(19) United States
(12) Patent Application Publication
(10) Pub. No.: US 2011/0091494 A1
(43) Pub. Date: Apr. 21, 2011

(54) PEPTIDES PROTECTIVE AGAINST S. PNEUMONIAE AND COMPOSITIONS, METHODS AND USES RELATING THERETO

(75) Inventors: Andreas Meinke, Pressbaum (AT); Astrid Teubenbacher, Vienna (AT); Beatrice Senn, Vienna (AT); Manuel Zerbs, Vienna (AT); Markus Hanner, Pressbaum (AT); Jutta Pikalo, Strau (AT); Eszter Nagy, Vienna (AT); Carmen Giefing, Vienna (AT); Alexander Von Gabain, Vienna (AT)

(73) Assignee: Intercell AG, Vienna (AT)

(21) Appl. No.: 12/933,020

(22) PCT Filed: Mar. 17, 2009
(86) PCT No.: PCT/EP09/53119

§ 371 Date: Dec. 10, 2010

(30) Foreign Application Priority Data
Mar. 17, 2008 (EP) 08102655.1

(51) Int. Cl. A61K 39/00; C12P 21/06; C12N 5/00; C12N 15/63; A61K 38/04; A61K 38/16; C07K 14/00; C07H 21/04

(52) U.S. Cl. 424/185.1; 435/70.2; 435/325; 435/320.1; 514/2.6; 514/21.2; 530/350; 536/23.1

(57) ABSTRACT

The present invention relates to a protective peptide of Streptococcus pneumoniae (S. pneumoniae) or a functionally active variant of the protective peptide; a composition comprising at least two protective peptides or functionally active variants thereof; a composition comprising at least two proteins selected from the group consisting of i) a first type of protective peptide or functionally active variant thereof, ii) a second type of protective peptide or functionally active variant thereof and iii) a supportive peptide or a functionally active variant thereof; one or more nucleic acid(s) encoding the protective peptide or functionally active variant thereof or the at least two proteins comprised in the composition; a pharmaceutical composition comprising the protective peptide or functionally active variant thereof, the composition, or the nucleic acid(s); a method of producing an antibody using the protective peptide or functionally active variant thereof or the composition; the use of the protective peptide or functionally active variant thereof and/or the composition and/or the nucleic acid(s) for the manufacture of a medicament for the immunization or treatment of a subject; a method of diagnosing a S. pneumoniae infection using the protective peptide or a functionally active variant thereof, the composition or a primer and/or probe specific for the nucleic acid(s); a method for identifying a ligand capable of binding to a protective peptide or functionally active variant thereof; and the use of a protective peptide or functionally active variant thereof for the isolation and/or purification and/or identification of an interaction partner of the peptide.

[0001] The present invention relates to a protective peptide of Streptococcus pneumoniae (S. pneumoniae) or a functionally active variant of the protective peptide; a composition comprising at least two protective peptides or functionally active variants thereof; a composition comprising at least two proteins selected from the group consisting of i) a first type of protective peptide or functionally active variant thereof, ii) a second type of protective peptide or functionally active variant thereof and iii) a supportive peptide or a functionally active variant thereof; one or more nucleic acid(s) encoding the protective peptide or functionally active variant thereof or the at least two proteins comprised in the composition; a pharmaceutical composition comprising the protective peptide or functionally active variant thereof, the composition, or the nucleic acid(s); a method of producing an antibody using the protective peptide or functionally active variant thereof or the composition; the use of the protective peptide or functionally active variant thereof and/or the composition and/or the nucleic acid(s) for the manufacture of a medicament for the immunization or treatment of a subject; a method of diagnosing a S. pneumoniae infection using the protective peptide or a functionally active variant thereof, the composition or a primer and/or probe specific for the nucleic acid(s); a method for identifying a ligand capable of binding to a protective peptide or functionally active variant thereof; and the use of a protective peptide or functionally active variant thereof for the isolation and/or purification and/or identification of an interaction partner of the peptide.

[0002] Streptococcus pneumoniae (Pneumococcus) is a lancet-shaped, gram-positive, facultative anaerobic bacterium. It is only the encapsulated organism that is pathogenic for humans and experimental animals. Capsules are antigenic and form the basis for classifying pneumococci by serotypes. Ninety serotypes have been identified, based on their reaction with type-specific antisera. The genome of S. pneumoniae contains app. 2.16 Mb. It has an average GC content of 39.7%. S. pneumoniae is a strictly human pathogen. The complete genome sequence of a capsular serotype 4 isolate of S. pneumoniae, designated TIGR4 (referred to in this application as TIGR4_Tettelin), was determined by the random shotgun sequencing strategy (GenBank accession number AE005672). This clinical isolate was taken from the blood of a 30-year-old male patient in Kongsvinger, Norway, and is highly invasive and virulent in a mouse model of infection.

[0003] Most S. pneumoniae serotypes have been shown to cause serious disease, and the ten most common serotypes are estimated to account for about 62% of invasive disease worldwide. The ranking and serotype prevalence differs by age group and geographic area.

[0004] Pneumococci are common inhabitants of the respiratory tract, and may be isolated from the nasopharynx of 5% to 70% of normal adults. Rates of asymptomatic carriage vary with age, environment, and the presence of upper respiratory infections. Only 5%-10% of adults without children are carriers. In schools and orphanages, 27% to 58% of students and residents may be carriers. On military installations, as many as 50% to 60% of service personnel may be carriers. The duration of carriage varies and is generally longer in children than adults (reviewed in Epidemiology and Prevention of Vaccine-Preventable Diseases, 7th Edition-Second Printing, The Pink Book).

[0005] The relationship of carriage to the development of natural immunity as well as the immunologic mechanism that allows disease to occur in a carrier are poorly understood.

[0006] Streptococcus pneumoniae is an important agent of human disease at the extremities of age and in those who have underlying disease. Pneumococcal disease kills more people—in the US 40,000 or more each year—than all other vaccine preventable diseases combined. The major clinical syndromes of pneumococcal disease include pneumonia, bacteremia, and meningitis. The disease most often occurs when a predisposing condition exists, particularly pulmonary disease. It is a common bacterial complication of antecedent viral respiratory infection such as influenza and measles, and of chronic conditions such as chronic obstructive pulmonary disease, diabetes, congestive heart failure, renal failure, smoking and alcoholism. Pneumococcal infections are more common during the winter and in early spring when respiratory diseases are more prevalent. Immunodeficiency (splenic dysfunction, iatrogen, etc.) is a risk factor for development of fatal pneumococcal infections, because of decreased bacterial clearance and lack of antibodies. The incubation period is short, 1-3 days. Symptoms include an abrupt onset of fever and shaking chills or rigor, productive cough, pleuritic chest pain, dyspnoe, tachycardia and hypoxia.

[0007] S. pneumoniae is responsible for 88% of bacteremia infections in the US. Pneumonia is the most common form of invasive pneumococcal diseases: 150,000-570,000 cases per year (US). 36% of adult community-acquired and 50% of hospital-acquired pneumonia is caused by S. pneumoniae (US). The incidence of disease among adults aged 65 years and older has been reported to be ˜60 cases/100,000. Case fatality rates for this disease increase from 1.4% for those aged two or younger to as high as 20.6% among those aged 80 or older. Diseases caused by influenza and Pneumococcus are together the fifth leading cause of death for persons aged 65 and older. Mortality attributable to these pathogens is more than 90% in this age group. Bacteremia occurs in about 25-30% of patients with pneumonia. The overall mortality rate of bacteremia is about 20%, but may be as high as 60% in elderly people. In 1998, 51% of all deaths attributable to invasive pneumococcal diseases occurred in age group above 65 years. Pneumococci cause 13%-19% of all cases of bacterial meningitis in the United States. An estimated 3,000 to 6,000 cases of pneumococcal meningitis occur each year. One-quarter of patients with pneumococcal meningitis also have pneumonia. The clinical symptoms, spinal fluid profile and neurologic complications are similar to other forms of purulent bacterial meningitis (reviewed in Epidemiology and Prevention of Vaccine-Preventable Diseases, 7th Edition-Second Printing, The Pink Book).

[0008] In children, Pneumococci are a common cause of acute otitis media, and are detected in 28%-55% of middle ear aspirates. By age 12 months, 62% of children have had at least one episode of acute otitis media. Middle ear infections are the most frequent reasons for pediatric office visits in the United States, resulting in over 20 million visits annually. Complications of pneumococcal otitis media may include mastoiditis and meningitis. Bacteremia without a known site of infection is the most common invasive clinical presentation among children <2 years of age, accounting for approximately 70% of invasive disease in this age group. Bacteremic pneumonia accounts for 12%-16% of invasive pneumococcal disease among children <2 years of age. With the decline of invasive Hib disease, S. pneumoniae has become the leading cause of bacterial meningitis among children <5 years of age in the United States. Children <1 year have the highest rates of pneumococcal meningitis, approximately 10 cases per 100,000 population. The burden of pneumococcal disease among children <5 years of age is significant. An estimated 17,000 cases of invasive disease occur each year, of which 13,000 are bacteremia without a known site of infection and about 700 are meningitis. An estimated 200 children die every year as a result of invasive pneumococcal disease. Although not considered invasive disease, an estimated 5 million cases of acute otitis media occur each year among children <5 years of age (reviewed Epidemiology and Prevention of Vaccine-Preventable Diseases, 7th Edition-Second Printing, The Pink Book).

[0009] A definitive diagnosis of infection with Streptococcus pneumoniae generally relies on isolation of the organism from blood or other normally sterile body sites. Tests are also available to detect capsular polysaccharide antigen in body fluids.

[0010] Penicillin is the drug of choice for treatment. However, successful implementation of anti-infective therapy has become increasingly difficult because of widespread antimicrobial resistance. Resistance to penicillin is rising, and according to recent reports it reaches 25% in the US (Whitney, C., et al. (2000), N Engl J Med 343: 1917-24). The proportion of macrolide-resistant strains reached ˜20% (Hyde, T., et al. (2001), JAMA 286: 1857-62). Use of antimicrobial agents is highly correlated with the increase in resistance of S. pneumoniae to β-lactams and macrolides (McCormick, A., et al. (2003), Nat Med 9: 424-30).

[0011] However, even with effective antibiotic therapy (sensitive strains), the case fatality rate of invasive disease is high with an average of 10% in the developed world and can be much higher with certain serotypes, in elderly patients and in cases of bacteremia or meningitis (up to 80%).

[0012] Thus, there remains a need for an effective treatment to prevent or ameliorate pneumococcal infections. A vaccine could not only prevent infections by streptococci, but more specifically prevent or ameliorate colonization of host tissues (esp. in nasopharynx), thereby reducing the incidence of upper respiratory infections and other suppurative infections, such as otitis media. Elimination of invasive diseases—pneumonia, bacteremia and meningitis, and sepsis—would be a direct consequence of reducing the incidence of acute infection and carriage of the organism. Vaccines capable of showing cross-protection against the majority of S. pneumoniae strains causing human infections would also be useful to prevent or ameliorate infections caused by all other streptococcal species, namely groups A, B, C and G.

[0013] A vaccine can contain a whole variety of different antigens. Examples of antigens are whole-killed or attenuated organisms, subfractions of these organisms/tissues, proteins, or, in their most simple form, peptides. Antigens can also be recognized by the immune system in form of glycosylated proteins or peptides and may also be or contain polysaccharides or lipids. Short peptides can be used since for example cytotoxic T-cells (CTL) recognize antigens in form of short, usually 8-11 amino acids long peptides in conjunction with major histocompatibility complex (MHC). B-cells can recognize linear epitopes as short as 4-5 amino acids, as well as three-dimensional structures (conformational epitopes). In some circumstances adjuvants may be useful for sustaining antigen-specific immune responses. Primarily, adjuvants are acting, but are not restricted in their mode of action, on so-called antigen presenting cells (APCs). These cells usually first encounter the antigen(s) followed by presentation of processed or unmodified antigen to immune effector cells. Intermediate cell types may also be involved. Only effector cells with the appropriate specificity are activated in a productive immune response. The adjuvant may also locally retain antigens and co-injected other factors. In addition the adjuvant may act as a chemoattractant for other immune cells or may act locally and/or systemically as a stimulating agent for the immune system.

[0014] Efforts to develop effective pneumococcal vaccines began as early as 1911. However, with the advent of penicillin in the 1940s, interest in the vaccine declined, until it was observed that many patients still died despite antibiotic treatment. By the late 60s, efforts were again being made to develop a polyvalent vaccine. The first pneumococcal vaccines contained purified capsular polysaccharide antigen from 14 different types of pneumococcal bacteria. In 1983, a 23-valent polysaccharide vaccine (PPV23) was licensed and replaced the 14-valent vaccine, which is no longer produced. PPV23 contains polysaccharide antigen from 23 types of pneumococcal bacteria which cause 88% of bacteremic pneumococcal disease. In addition, cross-reactivity occurs for several capsular types which account for an additional 8% of bacteremic disease. Two polysaccharide vaccines are available in the United States (Pneumovax 23, Merck, and Pnu-Immune 23, Wyeth-Lederle). Both vaccines contain 25 μg of each antigen per dose and include either phenol or thimerosal as a preservative.

[0015] The first pneumococcal conjugate vaccine (PCV7, Prevnar) was licensed in the United States in 2000. It includes purified capsular polysaccharide of 7 serotypes of S. pneumoniae (4, 9V, 14, 19F, 23F, 18C, and 6B) conjugated to a nontoxic variant of diphtheria toxin known as CRM197. The serotypes included in Prevnar accounted for 86% of bacteremia, 83% of meningitis, and 65% of acute otitis media among children <6 years of age in the United States during 1978-1994 (reviewed in Epidemiology and Prevention of Vaccine-Preventable Diseases, 7th Edition-Second Printing, The Pink Book). Additional pneumococcal polysaccharide conjugate vaccines containing 9 and 11 serotypes of S. pneumoniae are being developed. The vaccine is administered intramuscularly. After 4 doses of Prevnar vaccine, virtually all healthy infants develop antibody to all 7 serotypes contained in the vaccine. Prevnar has also been shown to be immunogenic in infants and children, including those with sickle cell disease and HIV infection. In a large clinical trial, Prevnar was shown to reduce invasive disease caused by vaccine serotypes, and reduce invasive disease caused by all serotypes, including serotypes not in the vaccine. Children who received Prevnar had fewer episodes of acute otitis media and underwent fewer tympanostomy tube placements than unvaccinated children. The duration of protection following Prevnar is currently unknown. Immunization with Prevnar reduces the rate of nasopharyngeal carriage of the vaccine serotypes, while the overall carriage rate is unaffected. Unfortunately, it has also been shown to induce serotype redistribution, that is the replacement of vaccine serotypes by strains, which are not covered by Prevnar (Pelton, S., et al. (2003), Vaccine 21: 1562-71).

[0016] Pneumococcal vaccine is recommended to be administered routinely to i., all children as part of the routine childhood immunization schedule, ii., adults 65 years of age and older and iii., persons aged >2 years with normal immune systems who have chronic illnesses, including cardiovascular disease, pulmonary disease, diabetes, alcoholism, cirrhosis, or cerebrospinal fluid leaks. In the elderly population the target groups for pneumococcal vaccine and influenza vaccine overlap. These vaccines can be given at the same time at different sites without increased side effects.

[0017] High mortality is observed among high-risk individuals (with underlying disease—mainly viral respiratory infection, immunocompromised) even with effective antibiotic therapy. The mAb approach targets patients with serious disease and provides immediate immune enhancement for the clearance of the bacteria. Through opsonization bacteria are killed within phagocytic cells and not lysed in the blood by antibiotics. This mechanism of action can help to eliminate the release of toxins (such as pneumolysin and other cytotoxins), which worsen the clinical condition of septic patients. Recent advances in the technology of monoclonal antibody production provide the means to generate human antibody reagents and reintroduce antibody therapies, while avoiding the toxicities associated with serum therapy. Immunoglobulins are an extremely versatile class of antimicrobial proteins that can be used to prevent and treat emerging infectious diseases. Antibody therapy has been effective against a variety of diverse microorganisms reviewed in (Burnie, J., et al. (1998), J Antimicrob Chemother 41: 319-22).

[0018] Although capsular specific antibodies have been shown to be highly protective, it remains unclear what concentration of these serotype-specific antibodies protect against disease and more recently it has become clear that opsonic activity and avidity of these antibodies are more critical determinants of protection than concentration.

[0019] Protein conjugate vaccines are no doubt a great new addition to the amarmatorium in the battle against pneumococcal disease, but the vaccine contains a limited number of pneumococcal serotypes and given adequate ecological pressure, replacement disease by non-vaccine serotypes remains a real threat, particularly in areas with very high disease burden.

[0020] During the last decade the immunogenicity and protective capacity of several pneumococcal proteins have been described in animal models and these are now being explored for the development of species-common protein based vaccines. Such proteins are the Pneumococcal surface protein A (PspA, McDaniel, L., et al. (1991), Infect Immun 59: 222-8; Roche, H., et al. (2003), Infect Immun 71: 1033-41), Pneumococcal surface adhesin A (PsaA, Talkington, D., et al. (1996), Microb Pathog 21: 17-22), Choline binding protein A (CbpA, Rosenow, C., et al. (1997); Mol Microbiol 25: 819-29), LytB glucosaminidase, LytC muramidase, PrtA serine protease, PhtA (histidine triad A) and Pneumococcal vaccine antigen A (PvaA) Wizemann, T., et al. (2001); Infect Immun 69: 1593-8; Adamou, J., et al. (2001); Infect Immun 69: 949-58).

[0021] Certain proteins or enzymes displayed on the surface of gram-positive organisms significantly contribute to pathogenesis, and might be involved in the disease process caused by these pathogens. Often, these proteins are involved in direct interactions with host tissues or in concealing the bacterial surface from the host defense mechanisms (Navarre, W., et al. (1999); Microbiol Mol Biol Rev 63: 174-229). S. pneumoniae is not an exception in this regard. Several surface proteins are characterized as virulence factors, important for pneumococcal pathogenicity as reviewed in Jedrzejas, M. (2001); Microbiol Mol Biol Rev 65: 187-207. If antibodies to these proteins could offer better protection to humans, they could provide the source of a novel, protein-based pneumococcal vaccine to be used in conjunction with or in place of the more traditional capsular polysaccharide vaccine. The use of some of the above-described proteins as antigens for a potential vaccine as well as a number of additional candidates reviewed in Di Guilmi, A., et al. (2002); EMBO Rep 3: 728-34 resulted mainly from a selection based on easiness of identification or chance of availability. In order to meet the demand to identify relevant antigens for S. pneumoniae in a more comprehensive way methods for identification, isolation and production of hyperimmune serum reactive antigens from a specific pathogen, especially from Staphylococcus aureus and Staphylococcus epidermidis (WO 02/059148) have been developed. Additionally, methods for identification of reactive antigens as well as reactive antigens of Streptococcus pneumoniae have been provided (WO 04/092209).

[0022] The problem underlying the present invention was to provide alternative means for the development of medicaments such as vaccines against S. pneumoniae infection. More particularly, the problem was to provide an alternative protective peptide or combinations thereof, particularly more effective proteins or combinations thereof, from S. pneumoniae that can be used for the manufacture of said medicaments.

[0023] Surprisingly, the object has been solved by one or more peptides consisting of the amino acid sequence of
[0024] SEQ ID NO:1, SEQ ID NO:2, SEQ ID NO:3, SEQ ID NO:4, and/or SEQ ID NO:5; and
[0025] optionally SEQ ID NO:6, SEQ ID NO:7, and/or SEQ ID NO:8.

[0026] However, a functionally active variant of these sequences may also be used in the context of the present invention.

[0027] Therefore, a first subject of the invention is a protective peptide consisting of the amino acid sequence of the SEQ ID NO:1, 2, 3, 4 or 5, or a functionally active variant of the protective peptide. These peptides (protective peptides of the amino acid sequence of the SEQ ID NO:1, 2, 3, 4 or 5, and functionally active variants thereof) are referred to as antigenic peptides of subgroup i).

[0028] The protective peptides consisting of the amino acid sequences of SEQ ID NO:1, 2, 3, 4 or 5 are derived from S. pneumoniae strain TIGR4_Tettelin (Tettelin et al. (2001), Science 293: 498-506) and have been denoted by SP0498, SP0609, SP0749, SP2027 and SP2194, respectively. The amino acid and DNA sequences of the full length proteins from which the protective peptides consisting of the amino acid sequences of SEQ ID NO:1, 2, 3, 4 and 5 are derived are disclosed in WO 04/092209.

[0029] The amino acid sequences of SEQ ID NO:1, 2, 3, 4 and 5 are disclosed in the Examples as well as in the attached Sequence Listing. The peptides of SEQ ID NO:1, 2, 3, 4 and 5 have been shown to induce a protective immune response against S. pneumoniae in a sepsis and/or pneumonia model (see Examples and Figures).

[0030] Functionally active variants may be obtained by changing the sequence of the protective peptide as defined below and are characterized by having a biological activity similar to that displayed by the protective peptide of the sequence of SEQ ID NO:1, 2, 3, 4 or 5 from which the variant is derived, including the ability to induce protective immune responses and/or to show protection against S. pneumoniae e.g. in a sepsis and/or pneumonia model, wherein any variant may be tested in any of the tests described in the Examples.

[0031] The functionally active variant of a protective peptide may be obtained by sequence alterations in the protective peptide, wherein the peptide with the sequence alterations retains a function of the unaltered protective peptide, e.g. having a biological activity similar to that displayed by the unaltered protective peptide (see above). Such sequence alterations can include, but are not limited to, (conservative) amino acid substitutions, deletions, mutations and insertions.

[0032] In a preferred embodiment of the invention the functionally active variant of the protective peptide consisting of the amino acid sequence of SEQ ID NO:1, 2, 3, 4 or 5
[0033] a) is a functionally active fragment of the protective peptide, the functionally active fragment comprising at least 75% of the sequence of the protective peptide, preferably at least 80%, more preferably at least 85%, still more preferably at least 90%, even more preferably at least 95% and most preferably at least 97%, 98% or 99%;
[0034] b) is derived from the protective peptide by at least one amino acid substitution and/or deletion, wherein the functionally active variant has a sequence identity to the protective peptide or to the functionally active fragment as defined in a) of at least 75%, preferably at least 80%, more preferably at least 85%, still more preferably at least 90%, even more preferably at least 95% and most preferably at least 97%, 98% or 99%; and/or
[0035] c) consists of the protective peptide or a functionally active variant thereof, preferably the variant of a) and/or b), and additionally at least one amino acid heterologous to the protective peptide.

[0036] The functionally active variant of the invention is characterized by having a biological activity similar to that displayed by the protective peptide, including the ability to induce protective immune responses and/or to show protection against S. pneumoniae e.g. in a sepsis and/or pneumonia model. The variant of the protective peptide is functionally active in the context of the present invention, if the activity of the variant amounts to at least 10%, preferably at least 25%, more preferably at least 50%, even more preferably at least 70%, still more preferably at least 80%, especially at least 90%, particularly at least 95%, most preferably at least 99% of the activity of the protective peptide without sequence alteration. The activity of the variant may be determined or measured as described in the Examples and then compared to that obtained for the protective peptide of the amino acid sequence of SEQ ID NO:1, 2, 3, 4 or 5.

[0037] The functionally active fragment of the protective peptide is characterized by being derived from the protective peptide of SEQ ID NO:1, 2, 3, 4 or 5 by one or more amino acid deletions resulting in a peptide comprising at least 75% of the sequence of the protective peptide, preferably at least 80%, more preferably at least 85%, still more preferably at least 90%, even more preferably at least 95% and most preferably at least 97%, 98% or 99%. Sequence identity may be determined as described below. The amino acid deletion(s) may be C-terminally, N-terminally and/or internally. Preferably the fragment is obtained by 1, 2, 3, 4, 5, 6, 7, 8, 9 or 10, more preferably 1, 2, 3, 4 or 5, even more preferably 1, 2 or 3, still more preferably 1 or 2, most preferably 1 amino acid deletion(s).

[0038] Alternatively or additionally the variant may be obtained from the protective peptide by at least one amino acid substitution and/or deletion, wherein the functionally active variant has a sequence identity to the protective peptide or to the functionally active fragment as defined in a) of at least 75%, preferably at least 80%, more preferably at least 85%, still more preferably at least 90%, even more preferably at least 95% and most preferably at least 97%, 98% or 99%. Sequence identity may be determined as described below. The amino acid substitution(s) and/or deletion(s) may be C-terminally, N-terminally and/or internally. Preferably the functionally active variant is obtained from the protective peptide or the fragment, preferably the protective peptide, by 1, 2, 3, 4, 5, 6, 7, 8, 9 or 10, more preferably 1, 2, 3, 4 or 5, even more preferably 1, 2 or 3, still more preferably 1 or 2, most preferably 1 amino acid substitution(s) and/or deletion(s).

[0039] Furthermore, the variant may consist of the protective peptide or the functionally active variant thereof, preferably the variant of a) and/or b), and at least one amino acid residue heterologous to the protective peptide or variant thereof, such as a marker protein. The feature “heterologous amino acid” or “amino acid heterologous to the protective peptide or variant thereof” refers to any amino acid which is different from that amino acid located adjacent to the protective protein in any naturally occurring protein of S. pneumoniae, particularly from that of S. pneumoniae strain TIGR4_Tettelin, especially the sequence made reference to above. Therefore, the protein of the invention encompassing at least one heterologous amino acid refers to a protein which is different from any naturally occurring protein of S. pneumoniae, particularly from that of S. pneumoniae strain TIGR4_Tettelin. The one or more additional amino acids may be C-terminally, N-terminally or C- and N-terminally to the protective peptide or variant thereof.

[0040] The following details are intended to refer to the protective peptides of subgroup i), the additional protective peptides as defined below as well as the supportive peptide as defined below and the variants of these:

[0041] The substituted or additional sequence or amino acid residue(s) as defined above consists of (an) amino acid residue(s), which may be any amino acid, which may be either an L- and/or a D-amino acid, naturally occurring and otherwise. Preferably the amino acid is any naturally occurring amino acid such as alanine, cysteine, aspartic acid, glutamic acid, phenylalanine, glycine, histidine, isoleucine, lysine, leucine, methionine, asparagine, proline, glutamine, arginine, serine, threonine, valine, tryptophan or tyrosine.

[0042] However, the amino acid residue(s) may also be (a) modified or (an) unusual amino acid(s). Examples of those are 2-aminoadipic acid, 3-aminoadipic acid, beta-alanine, 2-aminobutyric acid, 4-aminobutyric acid, 6-aminocaproic acid, 2-aminoheptanoic acid, 2-aminoisobutyric acid, 3-aminoisobutyric acid, 2-aminopimelic acid, 2,4-diaminobutyric acid, desmosine, 2,2′-diaminopimelic acid, 2,3-diaminopropionic acid, N-ethylglycine, N-ethylasparagine, hydroxylysine, allo-hydroxylysine, 3-hydroxyproline, 4-hydroxyproline, isodesmosine, allo-isoleucine, N-methylglycine, N-methylisoleucine, 6-N-methyllysine, N-methylvaline, norvaline, norleucine or ornithine. Additionally, the amino acid(s) may be subject to modifications such as posttranslational modifications. Examples of modifications include acetylation, amidation, blocking, formylation, gamma-carboxyglutamic acid hydroxylation, glycosilation, methylation, phosphorylation and sulfatation. If more than one substituted or additional or heterologous amino acid residue is present in the peptide, the amino acid residues may be the same or different from one another.

[0043] In one preferred embodiment of the invention, the functionally active variant of the peptide of the invention is essentially identical to the protective peptide of subgroup i), the additional protective peptide as defined below or the supportive peptide as defined below, but differs from the peptide of the SEQ ID NOS:1, 2, 3, 4, 5, 6, 7 or 8, respectively, in that it is derived from a homologous sequence of a different serotype of S. pneumoniae. As detailed above, more than 90 different serotypes of pneumococci have been identified so far. Accordingly, any of these serotypes may be the basis for the functionally active variant. However, preferably the strain is R6, TIGR4_Tettelin, or TIGR4_IC. The serotype is preferably 1, 2, 3, 4, 5, 6 (especially 6A or 6B), 7 (especially 7F), 8, 9 (especially 9N or 9V), 10 (especially 10A), 11 (especially 11A), 12 (especially 12F), 14, 15 (especially 15B), 17 (especially 17F), 18 (especially 18C), 19 (especially 19A or 19F), 20, 22 (especially 22F), 23 (especially 23F), or 33 (especially 33F). In a preferred embodiment, the serotype is 4, 6B, 14, 19A and 19F or 23F.

[0044] Examples of variants of peptides of SEQ ID NOS: 1, 2, 3, 4 and 5 derived from other strains or serotypes of S. pneumoniae are shown in Table 2, Tables 4 to 8, and Table 9, as well as in the Sequence Listing.

[0045] Examples of variants of peptides of SEQ ID NO: 6 derived from other strains or serotypes of S. pneumoniae are shown in SEQ ID NOs 206-218 in the Sequence Listing.

[0046] Examples of variants of peptides of SEQ ID NO: 7 derived from other strains or serotypes of S. pneumoniae are shown in SEQ ID NOs 219-317 in the Sequence Listing.

[0047] Examples of variants of peptides of SEQ ID NO: 8 derived from other strains or serotypes of S. pneumoniae are shown in SEQ ID NOs 318-331 in the Sequence Listing.

[0048] Further examples of homologous sequences of different serotypes and/or different S. pneumoniae strains are detailed below and are disclosed also in the attached sequence data.

[0049] Table 9 lists several different S. pneumoniae strains and their serotypes. From most of those strains one or more of the five full length proteins SP0498, SP0609, SP0749, SP2027 and SP2194 have been sequenced; “n.d.” shows, when a sequence has not been determined.

[0050] If the full length amino acid sequence of SP0498 from the respective strain listed in Table 9 has been confirmed by DNA sequencing and is identical to the full length amino acid sequence of SP0498 from TIGR4_Tettelin, this is indicated with “IDENT.” in the second column of Table 9. If the full length amino acid sequence of SP0498 from the respective strain is different from the full length amino acid sequence of SP0498 from TIGR4_Telletin, i.e. has at least one amino acid substitution, insertion or deletion, the respective SEQ ID NO (as listed in the Sequence Listing) of the full length SP0498 of said strain is given in the second column of Table 9. Accordingly, the full length amino acid sequences of SP0498 from strains with at least one amino acid difference compared to TIGR4_Tettelin are shown as SEQ ID NOs:45 to 93.

[0051] If the full length amino acid sequence of SP0609 from the respective strain listed in Table 9 has been confirmed by DNA sequencing and is identical to the full length amino acid sequence of SP0609 from TIGR4_Tettelin, this is indicated with “IDENT.” in the third column of Table 9. If the full length amino acid sequence of SP0609 from the respective strain is different from the full length amino acid sequence of SP0609 from TIGR4_Tettelin, i.e. has at least one amino acid substitution, insertion or deletion, the respective SEQ ID NO (as listed in the Sequence Listing) of the full length SP0609 of said strain is given in the third column of Table 9. Accordingly, the full length amino acid sequences of SP0609 from strains with at least one amino acid difference compared to TIGR4_Tettelin are shown as SEQ ID NOs:94 to 136.

[0052] If the full length amino acid sequence of SP0749 from the respective strain listed in Table 9 has been confirmed by DNA sequencing and is identical to the full length amino acid sequence of SP0749 from TIGR4_Tettelin, this is indicated with “IDENT.” in the fourth column of Table 9. If the full length amino acid sequence of SP0749 from the respective strain is different from the full length amino acid sequence of SP0749 from TIGR4_Tettelin, i.e. has at least one amino acid substitution, insertion or deletion, the respective SEQ ID NO (as listed in the Sequence Listing) of the full length SP0749 of said strain is given in the fourth column of Table 9. Accordingly, the full length amino acid sequences of SP0749 from strains with at least one amino acid difference compared to TIGR4_Tettelin are shown as SEQ ID NOs:137 to 172.

[0053] If the full length amino acid sequence of SP2027 from the respective strain listed in Table 9 has been confirmed by DNA sequencing and is identical to the full length amino acid sequence of SP2027 from TIGR4_Tettelin, this is indicated with “IDENT.” in the fifth column of Table 9. If the full length amino acid sequence of SP2027 from the respective strain is different from the full length amino acid sequence of SP2027 from TIGR4_Tettelin, i.e. has at least one amino acid substitution, insertion or deletion, the respective SEQ ID NO (as listed in the Sequence Listing) of the full length SP2027 of said strain is given in the fifth column of Table 9. Accordingly, the full length amino acid sequences of SP2027 from strains with at least one amino acid difference compared to TIGR4_Tettelin are shown as SEQ ID NOs:173 to 186.

[0054] If the full length amino acid sequence of SP2194 from the respective strain listed in Table 9 has been confirmed by DNA sequencing and is identical to the full length amino acid sequence of SP2194 from TIGR4_Tettelin, this is indicated with “IDENT.” in the sixth column of Table 9. If the full length amino acid sequence of SP2194 from the respective strain is different from the full length amino acid sequence of SP2194 from TIGR4_Tettelin, i.e. has at least one amino acid substitution, insertion or deletion, the respective SEQ ID NO (as listed in the Sequence Listing) of the full length SP2194 of said strain is given in the sixth column of Table 9. Accordingly, the full length amino acid sequences of SP2194 from strains with at least one amino acid difference compared to TIGR4_Tettelin are shown as SEQ ID NOs:187 to 205.

[0055] The genomic sequences from different S. pneumoniae strains may be obtained from the following sources:

a) Streptococcus pneumoniae TIGR4 (also referred to as TIGR4_Tettelin, as described in Tettelin et al. (2001), Science 293: 498-506)
(GenBank accession number: AE005672; remark: completed)
http://cmr.tigr.org/tigr-scripts/CMR/GenomePage.cgi?org=bsp
b) Streptococcus pneumoniae R6
(GenBank accession number: AE007317; remark: completed)
http://cmr.tigr.org/tigr-scripts/CMR/GenomePage.cgi?org=ntsp02
c) Streptococcus pneumoniae Serotype 2 Strain D39
(GenBank accession number: CP000410; remark: completed)
d) Streptococcus pneumoniae G54

### (Genbank Accession Number: -; Remark: Unfinished)

[0056] http://cmr.tigr.org/tigr-scripts/CMR/GenomePage.cgi?org=ntsp05

[0057] The term “functionally active variant” includes naturally occurring allelic variants, as well as mutants or any other non-naturally occurring variants. As is known in the art, an allelic variant is an alternate form of a (poly)peptide that is characterized as having a substitution, deletion, or addition of one or more amino acids that does essentially not alter the biological function of the polypeptide. By “biological function” is meant a function of the peptide in the cells in which it naturally occurs, even if the function is not necessary for the growth or survival of the cells. For example, the biological function of a porin is to allow the entry into cells of compounds present in the extracellular medium. The biological function is distinct from the antigenic function. A polypeptide can have more than one biological function.

[0058] Accordingly, the present invention also relates to antigenic peptides, i.e. protective peptides and functionally active variants thereof, optionally in combination with one or more additional protective peptides or functionally active variants thereof as defined below, and/or optionally in combination with one or more supportive peptides or functionally active variants thereof as defined below, of different S. pneumoniae isolates. Such homologues may easily be identified and isolated based on the nucleic acid and amino acid sequences disclosed herein. A homologous protective peptide, additional protective peptide or supportive peptide of a different serotype may be identified by e.g. sequence alignment. The homologous sequence may vary from the protective peptide of subgroup i), the additional protective peptide as defined below or the supportive peptide as defined below of the sequence of SEQ ID NOS:1, 2, 3, 4, 5, 6, 7 or 8, respectively, by one or more amino acid substitutions, deletions and/or additions.

[0059] Percentage of sequence identity can be determined e.g. by sequence alignment. Methods of alignment of sequences for comparison are well known in the art. Various programs and alignment algorithms have been described e.g. in Smith and Waterman (1981), Adv. Appl. Math. 2: 482 or Pearson and Lipman (1988), Proc. Natl. Acad. Sci. U.S.A. 85: 2444-48.

[0060] The NCBI Basic Local Alignment Search Tool (BLAST) (Altschul et al. (1990), J. Mol. Biol. 215: 403-10) is available from several sources, including the National Center for Biotechnology Information (NCBI, Bethesda, Md.) and on the Internet, for use in connection with the sequence analysis programs blastp, blastn, blastx, tblastn and tblastx. Variants, e.g. of any protective, additional protective or supportive peptide of the sequences of SEQ ID NOS: 1 to 8 are typically characterized using the NCBI Blast 2.0, gapped blastp set to default parameters. For comparisons of amino acid sequences of e.g. at least 35 amino acids, the Blast 2 sequences function may be employed using the default BLOSUM62 matrix set to default parameters, (gap existence cost of 11, and a per residue gap cost of 1).

[0061] In a preferred embodiment, the functionally active variant derived from the peptide as defined above by amino acid exchanges, deletions or insertions may also conserve, or more preferably improve, the activity (as defined above). Furthermore, these peptides may also cover epitopes, which trigger the same or preferably an improved T cell response. These epitope are referred to as “heteroclitic”. They have a similar or preferably greater affinity to MHC/HLA molecules, and the ability to stimulate the T cell receptors (TCR) directed to the original epitope in a similar or preferably stronger manner. Heteroclitic epitopes can be obtained by rational design i.e. taking into account the contribution of individual residues to binding to MHC/HLA as for instance described by (Rammensee, H. et al. (1999), Immunogenetics. 50: 213-19), combined with a systematic exchange of residues potentially interacting with the TCR and testing the resulting sequences with T cells directed against the original epitope. Such a design is possible for a skilled man in the art without much experimentation.

[0062] Conservative substitutions are those that take place within a family of amino acids that are related in their side chains and chemical properties. Examples of such families are amino acids with basic side chains, with acidic side chains, with non-polar aliphatic side chains, with non-polar aromatic side chains, with uncharged polar side chains, with small side chains, with large side chains etc. In one embodiment, one conservative substitution is included in the peptide. In another embodiment, two conservative substitutions or less are included in the peptide. In a further embodiment, three conservative substitutions or less are included in the peptide.

[0063] Examples of conservative amino acid substitutions include, but are not limited to, those listed below:

| Original Residue | Conservative Substitutions |
|---|---|
| Ala | Ser |
| Arg | Lys |
| Asn | Gln; His |
| Asp | Glu |
| Cys | Ser |
| Gln | Asn |
| Glu | Asp |
| His | Asn; Gln |
| Ile | Leu; Val |
| Leu | Ile; Val |
| Lys | Arg; Gln; Asn |
| Met | Leu; Ile |
| Phe | Met; Leu; Tyr |
| Ser | Thr |
| Thr | Ser |
| Trp | Tyr |
| Tyr | Trp; Phe |
| Val | Ile; Leu |

[0064] In another embodiment of the invention the peptide as defined above may be modified by one or more of a variety of chemical techniques to produce derivatives having essentially the same activity (as defined above for fragments and variants) as the modified peptides, and optionally having other desirable properties. For example, carboxylic acid groups of the protein, whether C-terminal or side chain, may be provided in the form of a salt of a pharmaceutically-acceptable cation or esterified to form an ester, or converted to an amide. Amino groups of the peptide, whether amino-terminal or side chain, may be in the form of a pharmaceutically-acceptable acid addition salt, such as the HCl, HBr, acetic, benzoic, toluene sulfonic, maleic, tartaric and other organic salts, or may be converted to an amide. Hydroxyl groups of the peptide side chains may be converted to alkoxy or to an ester using well recognized techniques. Phenyl and phenolic rings of the peptide side chains may be substituted with one or more halogen atoms, such as fluorine, chlorine, bromine or iodine, or with alkyl, alkoxy, carboxylic acids and esters thereof, or amides of such carboxylic acids. Thiols can be protected with any one of a number of well recognized protecting groups, such as acetamide groups.

[0065] Peptides of this invention may be in combination with outer surface proteins or other proteins or antigens of other proteins. In such combination, the peptide(s) may be in the form of one or more fusion proteins. The antigenic peptide or supportive peptide of the invention may be optionally fused to a selected peptide or protein derived from other microorganisms. For example, a peptide or protein of this invention may be fused at its N-terminus or C-terminus to a polypeptide from another pathogen or to more than one polypeptide in sequence. Peptides which may be useful for this purpose include polypeptides identified by the prior art.

[0066] In a preferred embodiment of the invention the peptide of the invention is fused to an epitope tag which provides an epitope to which an anti-tag substance can selectively bind. The epitope tag is generally placed at the N- or C-terminus of the peptide but may be incorporated as an internal insertion or substitution as the biological activity permits. The presence of such epitope-tagged forms of a peptide can be detected using a substance such as an antibody against the tagged peptide. Also, provision of the epitope tag enables the peptide to be readily purified by affinity purification using an anti-tag antibody or another type of affinity matrix that binds to the epitope tag. Various tag polypeptides and their respective antibodies are well known in the art. Examples include a poly-histidine (poly-his) tag, e.g. a hexa-histidine tag as described in the Examples, a poly-histidine-glycine (poly-his-gly) tag, the HA tag polypeptide, the c-myc tag, the Strep tag and the FLAG tag.

[0067] Fusions also may include the peptides of this invention fused or coupled to moieties other than amino acids, including lipids and carbohydrates. Further, peptides/proteins/compositions of this invention may be employed in combination with other vaccinal agents described by the prior art, as well as with other species of vaccinal agents derived from other microorganisms. Such proteins are useful in the prevention, treatment and diagnosis of diseases caused by a wide spectrum of Streptococcus isolates.

[0068] These fusion proteins are constructed for use in the methods and compositions of this invention. These fusion proteins or multimeric proteins may be produced recombinantly, or may be synthesized chemically.

[0069] The peptides and proteins described herein may be prepared by any of a number of conventional techniques. Desired peptides may be chemically synthesized. An alternative approach involves generating the fragments of known peptides by enzymatic digestion, e.g., by treating the protein with an enzyme known to cleave proteins at sites defined by particular amino acid residues, or by digesting the DNA with suitable restriction enzymes, expressing the digested DNA and isolating the desired fragment. Yet another suitable technique involves isolating and amplifying a DNA fragment encoding a desired peptide fragment, by polymerase chain reaction (PCR). Oligonucleotides that define the desired termini of the DNA fragment are employed as the 5′ and 3′ primers in the PCR. Techniques for making mutations, such as deletions, insertions and substitutions, at predetermined sites in DNA, and therefore in proteins, having a known sequence are well known. One of skill in the art using conventional techniques, such as PCR, may readily use the peptides, proteins and compositions provided herein to identify and isolate other similar proteins. Such methods are routine and not considered to require undue experimentation, given the information provided herein. For example, variations can be made using oligonucleotide-mediated site-directed mutagenesis (Carter et al. (1985), Nucl. Acids Res. 13: 4431; Zoller et al. (1987), Nucl. Acids Res. 10: 6487), cassette mutagenesis (Wells et al. (1985), Gene, 34: 315), restriction selection mutagenesis (Wells et al. (1986), Philos. Trans. R. Soc. London SerA 317: 415), PCR mutagenesis, or other known techniques can be performed on the cloned DNA to produce the peptide or composition of the invention.

[0070] Another subject of the invention relates to a composition comprising at least two proteins selected from the group consisting of a protective protein comprising or consisting of the protective peptide or functionally active variant thereof as described above.

[0071] Another subject of the invention relates to a composition comprising at least two proteins selected from the group consisting of
[0072] i) a protective protein comprising or consisting of the antigenic peptide of subgroup i);
[0073] ii) an additional protective protein comprising or consisting of the additional protective peptide consisting of the amino acid sequence of the SEQ ID NO: 6 or 7, or a functionally active variant thereof, and
[0074] iii) a supportive protein comprising or consisting of the supportive peptide of the SEQ ID NO:8 or a functionally active variant thereof,
   wherein the at least two proteins are selected from at least two of the subgroups i), ii) and iii).

[0075] The additional protective peptides of the amino acid sequence of the SEQ ID NO:6 or 7 and functionally active variants thereof are referred to as antigenic peptides of subgroup ii). Antigenic peptides of subgroup i) and ii) are referred to as antigenic peptides.

[0076] The supportive peptides of the amino acid sequence of the SEQ ID NO:8 and functionally active variants thereof are referred to as supportive peptides of subgroup iii).

[0077] The additional protective peptide consisting of the amino acid sequence of SEQ ID NO:6 is derived from S. pneumoniae serotype 4 strain TIGR4_Tettelin and has been denoted by SP2216-1. The additional protective peptide consisting of the amino acid sequence of SEQ ID NO:7 is derived from S. pneumoniae serotype 6B strain Pj-1259 and has been denoted by SP1732-3. The amino acid and DNA sequences of the full length proteins from which the additional protective peptides consisting of the amino acid sequence of the SEQ ID NO:6 and 7 are disclosed in WO 04/092209 as SEQ ID NO:243 and 99, and SEQ ID NO:214 and 70, respectively. However, the sequences of SEQ ID NO:214 and 70 as disclosed in WO 04/092209 relate to S. pneumoniae strain TIGR4_Tettelin, whereas the SEQ ID NO:7 of the present invention relates to S. pneumoniae serotype 6B strain Pj-1259. It is noted that SEQ ID NO:7 of the present invention differs from that of WO 04/092209 in that at position 279 of SEQ ID NO:7 there is a V (valine) as compared to an A (alanine) in the sequence of WO 04/092209.

[0078] The amino acid sequences of SEQ ID NO:6 and 7 are disclosed in the Examples as well as in the attached Sequence Listing. The peptides of SEQ ID NO:6 and/or 7 have been shown to induce a protective immune response against S. pneumoniae in a sepsis and/or pneumonia model (see Examples and Figures).

[0079] Functionally active variants may be obtained by changing the sequence of the additional protective peptides as defined herein and are characterized by having a biological activity similar to that displayed by the additional protective peptide of the sequence of SEQ ID NO:6 or 7 from which the variant is derived, including the ability to induce protective immune responses and/or to show protection against S. pneumoniae e.g. in a sepsis and/or pneumonia model, wherein any variant may be tested in any of the tests described in the Examples.

[0080] The functionally active variant of an additional protective peptide may be obtained as described above.

[0081] In a preferred embodiment of the invention the functionally active variant of the additional protective peptide consisting of the amino acid sequence of the SEQ ID NO:6 or 7
[0082] a) is a functionally active fragment of the additional protective peptide, the functionally active fragment comprising at least 75% of the sequence of the additional protective peptide, preferably at least 80%, more preferably at least 85%, still more preferably at least 90%, even more preferably at least 95% and most preferably at least 97%, 98% or 99%;
[0083] b) is derived from the additional protective peptide by at least one amino acid substitution, addition and/or deletion, wherein the functionally active variant has a sequence identity to the additional protective peptide or to the functionally active fragment as defined in a) of at least 75%, preferably at least 80%, more preferably at least 85%, still more preferably at least 90%, even more preferably at least 95% and most preferably at least 97%, 98% or 99%; and/or
[0084] c) consists of the additional protective peptide or a functionally active variant thereof, preferably the variant of a) and/or b), and additionally at least one amino acid heterologous to the additional protective peptide.

[0085] The functionally active variant of the additional protective peptide according to the invention is characterized by having a biological activity similar to that displayed by the additional protective peptide, including the ability to induce protective immune responses and/or to show protection against S. pneumoniae e.g. in a sepsis and/or pneumonia model. The variant of the additional protective peptide is functionally active in the context of the present invention, if the activity of the variant amounts to at least 10%, preferably at least 25%, more preferably at least 50%, even more preferably at least 70%, still more preferably at least 80%, especially at least 90%, particularly at least 95%, most preferably at least 99% of the activity of the additional protective peptide without sequence alteration. The activity of the variant of the additional protective peptide may be determined or measured as described in the Examples and then compared to that obtained for the additional protective peptide of the amino acid sequence of SEQ ID NO:6 or 7.

[0086] The functionally active fragment of the additional protective peptide is characterized by being derived from the protective peptide of SEQ ID NO:6 or 7 by one or more amino acid deletions resulting in a peptide comprising at least 75% of the sequence of the additional protective peptide, preferably at least 80%, more preferably at least 85%, still more preferably at least 90%, even more preferably at least 95% and most preferably at least 97%, 98% or 99%. Sequence identity may be determined as described below. The amino acid deletion(s) may be C-terminally, N-terminally and/or internally. Preferably the fragment is obtained by 1, 2, 3, 4, 5, 6, 7, 8, 9 or 10, more preferably 1, 2, 3, 4 or 5, even more preferably 1, 2 or 3, still more preferably 1 or 2, most preferably 1 amino acid deletion(s).

[0087] Alternatively or additionally the variant may be obtained from the additional protective peptide by at least one amino acid substitution, addition and/or deletion, wherein the functionally active variant has a sequence identity to the additional protective peptide or to the functionally active fragment as defined in a) of at least 75%, preferably at least 80%, more preferably at least 85%, still more preferably at least 90%, even more preferably at least 95% and most preferably at least 97%, 98% or 99%. Sequence identity may be determined as described below. The amino acid substitution(s), addition(s) and/or deletion(s) may be C-terminally, N-terminally and/or internally. Preferably the functionally active variant is obtained from the additional protective peptide or the fragment, preferably the additional protective peptide, by 1, 2, 3, 4, 5, 6, 7, 8, 9 or 10, more preferably 1, 2, 3, 4 or 5, even more preferably 1, 2 or 3, still more preferably 1 or 2, most preferably 1 amino acid substitution(s), addition(s) and/or deletion(s).

[0088] Furthermore, the variant may consist of the additional protective peptide or the functionally active variant thereof, preferably the variant of a) and/or b), and at least one amino acid residue heterologous to the additional protective peptide or variant thereof, such as a marker protein. The feature “heterologous amino acid” or “amino acid heterologous to the additional protective peptide or variant thereof” refers to any amino acid which is different from that amino acid located adjacent to the additional protective protein in any naturally occurring protein of S. pneumoniae, particularly from that of S. pneumoniae strain TIGR4_Tettelin or serotype 6B, especially the sequence made reference to above. Therefore, the protein of the invention encompassing at least one heterologous amino acid refers to a protein which is different from any naturally occurring protein of S. pneumoniae, particularly from that of S. pneumoniae strain TIGR4_Tettelin or serotype 6B. The one or more additional amino acids may be C-terminally, N-terminally or C- and N-terminally to the additional protective peptide or variant thereof.

[0089] The supportive peptide consisting of the amino acid sequence of SEQ ID NO:8 is derived from pneumococcal surface adhesin A (PsaA) from S. pneumoniae serotype 6B strain Pj-1259. The amino acid and DNA sequences of the full length protein from which the supportive peptide consisting of the amino acid sequence of the SEQ ID NO:8 is disclosed in U.S. Pat. No. 5,854,416 as SEQ ID NO:2 and 1 (GenBank accession numbers: AAE22907 and AR069091). Throughout the entire description of the present invention (including the Figures), PsaA may further be denoted as SP1650.

[0090] The amino acid sequence of SEQ ID NO:8 is disclosed in the Examples as well as in the attached Sequence Listing. The peptide of SEQ ID NO:8 has been shown to support induction of a protective immune response against S. pneumoniae in a sepsis and/or pneumonia model (see Examples and Figures), if used in combination with the antigenic peptides of the invention.

[0091] Functionally active variants may be obtained by changing the sequence of the supportive peptide as defined herein and are characterized by having a supportive activity similar to that displayed by the supportive peptide of the sequence of SEQ ID NO:8 from which the variant is derived, including the ability to induce protective immune responses and/or to show protection against S. pneumoniae e.g. in a sepsis and/or pneumonia model in combination with one or more antigenic peptides of the invention, wherein any variant may be tested in any of the tests described in the Examples.

[0092] The functionally active variant of a supportive peptide may be obtained by sequence alterations in the supportive peptide, wherein the peptide with the sequence alterations retains a function of the unaltered protective peptide, e.g. having a biological activity similar to that displayed by the unaltered supportive peptide (see above). Such sequence alterations can include, but are not limited to, (conservative) amino acid substitutions, deletions, mutations and insertions. For further details on alterations and variants see above.

[0093] In a preferred embodiment the functionally active variant of the supportive peptide
[0094] a) is a functionally active fragment of the supportive peptide, the functionally active fragment comprising at least 60% of the sequence of the supportive peptide, preferably at least 70%, more preferably at least 80%, still more preferably at least 90%, even more preferably at least 95% and most preferably at least 97%, 98% or 99%;
[0095] b) is derived from the supportive peptide by at least one amino acid substitution, addition and/or deletion and has a sequence identity to the supportive peptide or to the functionally active fragment as defined in a) of at least 60%, preferably at least 70%, more preferably at least 80%, still more preferably at least 90%, even more preferably at least 95% and most preferably at least 97%, 98% or 99%; and/or
[0096] c) consists of the supportive peptide or a functionally active variant thereof, preferably the variant of a) and/or b), and additionally at least one amino acid heterologous to the supportive peptide.

[0097] The functionally active variant of the supportive peptide according to the invention is characterized by having a biological activity similar to that displayed by the supportive peptide, including the ability to support induction of a protective immune response against different serotypes and/or protection against S. pneumoniae in a sepsis and/or pneumonia model (see Examples), if used in combination with the antigenic peptides of the invention.

[0098] The variant of the supportive peptide is functionally active in the context of the present invention, if the activity of the variant in combination with the antigenic peptide(s) of the invention amounts to at least 10%, preferably at least 25%, more preferably at least 50%, even more preferably at least 70%, still more preferably at least 80%, especially at least 90%, particularly at least 95%, most preferably at least 99% of the activity of the supportive peptide in combination with the antigenic peptide(s) of the invention without sequence alteration. The activity of the variant of the supportive peptide in combination with the antigenic peptide(s) of the invention may be determined or measured as described in the Examples and then compared to that obtained for the supportive peptide of the amino acid sequence of SEQ ID NO:8 in combination with the antigenic peptide(s) of the invention.

[0099] The functionally active fragment of the supportive peptide is characterized by being derived from the supportive peptide of SEQ ID NO:8 by one or more deletions resulting in a peptide comprising at least 60% of the sequence of the supportive peptide, preferably at least 70%, more preferably at least 80%, still more preferably at least 90%, even more preferably at least 95% and most preferably at least 97%, 98% or 99%. Sequence identity may be determined as described above. The deletion(s) may be C-terminally, N-terminally and/or internally. Preferably the fragment is obtained by 1, 2, 3, 4, 5, 6, 7, 8, 9 or 10, more preferably 1, 2, 3, 4 or 5, even more preferably 1, 2 or 3, still more preferably 1 or 2, most preferably 1 deletion(s).

[0100] Alternatively or additionally the variant may be obtained from the supportive peptide by at least one amino acid substitution, addition and/or deletion, wherein the functionally active variant has a sequence identity to the supportive peptide or to the functionally active fragment as defined in a) of at least 60%, preferably at least 70%, more preferably at least 80%, still more preferably at least 90%, even more preferably at least 95% and most preferably at least 97%, 98% or 99%. Sequence identity may be determined as described above. The substitution(s), addition(s) and/or deletion(s) may be C-terminally, N-terminally and/or internally. Preferably the functionally active variant is obtained from the supportive peptide or the fragment, preferably the supportive peptide, by 1, 2, 3, 4, 5, 6, 7, 8, 9 or 10, more preferably 1, 2, 3, 4 or 5, even more preferably 1, 2 or 3, still more preferably 1 or 2, most preferably 1 amino acid substitution(s), addition(s) and/or deletion(s).

[0101] Furthermore, the variant may consist of the supportive peptide or the functionally active variant thereof, preferably the variant of a) and/or b), and at least one amino acid residue heterologous to the supportive peptide or variant thereof, such as a marker protein. The feature “heterologous amino acid” or “amino acid heterologous to the supportive peptide or variant thereof” refers to any amino acid which is different from that amino acid located adjacent to the supportive protein in any naturally occurring protein of S. pneumoniae, especially the sequence made reference to above. The one or more additional amino acids may be C-terminally, N-terminally or C- and N-terminally to the supportive peptide or variant thereof.

[0102] Another subject of the invention relates to a composition comprising at least three proteins selected from the group consisting of
[0103] i) a protective protein comprising or consisting of the antigenic peptide of subgroup i);
[0104] ii) an additional protective protein comprising or consisting of the antigenic peptide of subgroup ii), and
[0105] iii) a supportive protein comprising or consisting of the supportive peptide of subgroup iii),
   wherein the at least three proteins are selected from at least two of the subgroups i), ii), and iii).

[0106] In one preferred embodiment the composition of the invention comprises at least one protein selected from the subgroup i), and at least two proteins selected from the subgroups ii) and/or iii).

[0107] In another preferred embodiment the composition of the invention comprises at least three proteins selected from the three subgroups i), ii), and iii).

[0108] In still another preferred embodiment the composition of the invention is defined in that two or more proteins of the at least two proteins are combined into one fusion protein. HI Accordingly, the two or more proteins may be combined into one or more fusion proteins. The resulting fusion protein(s) may encompass two or more of the proteins of subgroups i), ii) and/or iii) as defined above.

[0109] The fusion protein may comprise or consist of two or more proteins as defined above. Additionally, the fusion protein may encompass a linker, such as a protein linker, to connect the two or more proteins or additional C- or N-terminal sequences, such as a tag in order to purify the fusion protein. Additional sequences may also result from genetic engineering and the use of suitable restriction sites when preparing the nucleic acid sequences underlying the fusion protein.

[0110] A protein of SEQ ID NO:1 to 8 is intended to relate to a protective/additional protective/supportive protein comprising or consisting of a peptide of SEQ ID NO:1 to 8, respectively, as defined above. A variant of a protein of SEQ ID NO:1 to 8 is intended to relate to a protective/additional protective/supportive protein comprising or consisting of a functionally active variant of SEQ ID NO:1 to 8, respectively, as defined above.

[0111] The proteins of subgroup i), ii) and/or iii) combined in a fusion protein may be directly joined to each other or may be combined over a linker. The linker may be e.g. a short amino acid sequence. The linker may result from the genetic engineering of a suitable fusion protein or may be introduced in order to allow the single proteins to operate effectively.

[0112] In another embodiment of the invention the composition may comprise at least one further protein of subgroup i), ii) and/or iii) in addition to the fusion protein as detailed above.

[0113] In another preferred embodiment the composition of the invention comprises
[0114] at least one protein as defined in i) and at least one protein as defined in ii); or
[0115] at least one protein as defined in i) and at least one protein as defined in iii); or
[0116] at least one protein as defined in i) and at least two proteins as defined in ii); or
[0117] at least one protein as defined in i) and at least two proteins as defined in iii) or
[0118] at least one protein as defined in i) and at least one protein as defined in ii) and at least one protein as defined in iii).

[0119] More preferably, the composition of the invention as defined in any of the above embodiments comprises
[0120] at least one protein comprising or consisting of the amino acid sequence of SEQ ID NO:1, 2, 3, 4, or 5 and at least one protein comprising or consisting of the amino acid sequence of SEQ ID NO:6; or
[0121] at least one protein comprising or consisting of the amino acid sequence of SEQ ID NO:1, 2, 3, 4, or 5 and at least one protein comprising or consisting of the amino acid sequence of SEQ ID NO:7; or
[0122] at least one protein comprising or consisting of the amino acid sequence of SEQ ID NO:1, 2, 3, 4, or 5 and at least one protein comprising or consisting of the amino acid sequence of SEQ ID NO:8; or
[0123] at least one protein comprising or consisting of the amino acid sequence of SEQ ID NO:1, 2, 3, 4, or 5 and at least one protein comprising or consisting of the amino acid sequence of SEQ ID NO:6 and at least one protein comprising or consisting of the amino acid sequence of SEQ ID NO:7; or
[0124] at least one protein comprising or consisting of the amino acid sequence of SEQ ID NO: 1, 2, 3, 4, or 5 and at least one protein comprising or consisting of the amino acid sequence of SEQ ID NO:6 and at least one protein comprising or consisting of the amino acid sequence of SEQ ID NO:8; or
[0125] at least one protein comprising or consisting of the amino acid sequence of SEQ ID NO: 1, 2, 3, 4, or 5 and at least one protein comprising or consisting of the amino acid sequence of SEQ ID NO:7 and at least one protein comprising or consisting of the amino acid sequence of SEQ ID NO:8.

[0126] Examples of the most preferred compositions include the following proteins:
[0127] Protein of SEQ ID NO:1, Protein of SEQ ID NO:6 and Protein of SEQ ID NO:7;
[0128] Protein of SEQ ID NO:2, Protein of SEQ ID NO:6 and Protein of SEQ ID NO:7;
[0129] Protein of SEQ ID NO:3, Protein of SEQ ID NO:6 and Protein of SEQ ID NO:7;
[0130] Protein of SEQ ID NO:4, Protein of SEQ ID NO:6 and Protein of SEQ ID NO:7;
[0131] Protein of SEQ ID NO:5, Protein of SEQ ID NO:6 and Protein of SEQ ID NO:7;
[0132] Protein of SEQ ID NO:1, Protein of SEQ ID NO:7 and Protein of SEQ ID NO:8;
[0133] Protein of SEQ ID NO:2, Protein of SEQ ID NO:7 and Protein of SEQ ID NO:8;
[0134] Protein of SEQ ID NO:3, Protein of SEQ ID NO:7 and Protein of SEQ ID NO:8;
[0135] Protein of SEQ ID NO:4, Protein of SEQ ID NO:7 and Protein of SEQ ID NO:8; or
[0136] Protein of SEQ ID NO:5, Protein of SEQ ID NO:7 and Protein of SEQ ID NO:8.

[0137] In a preferred embodiment the composition of the invention comprises a functionally active variant of the additional protective peptide wherein the functionally active variant
[0138] a) is a functionally active fragment of the additional protective peptide, the functionally active fragment comprising at least 60% of the sequence of the supportive peptide, preferably at least 70%, more preferably at least 80%, still more preferably at least 90%, even more preferably at least 95% and most preferably at least 97%, 98% or 99%;
[0139] b) is derived from the additional protective peptide by at least one amino acid substitution, addition and/or deletion and has a sequence identity to the additional protective peptide or to the functionally active fragment as defined in a) of at least 60%, preferably at least 70%, more preferably at least 80%, still more preferably at least 90%, even more preferably at least 95% and most preferably at least 97%, 98% or 99%; and/or
[0140] c) consists of the additional protective peptide or a functionally active variant thereof and at least one amino acid heterologous to the additional protective peptide.

[0141] In a preferred embodiment the composition of the invention comprises a functionally active variant of the supportive peptide wherein the functionally active variant
[0142] a) is a functionally active fragment of the supportive peptide, the functionally active fragment comprising at least 60% of the sequence of the supportive peptide, preferably at least 70%, more preferably at least 80%, still more preferably at least 90%, even more preferably at least 95% and most preferably at least 97%, 98% or 99%;
[0143] b) is derived from the supportive peptide by at least one amino acid substitution, addition and/or deletion and has a sequence identity to the supportive peptide or to the functionally active fragment as defined in a) of at least 60%, preferably at least 70%, more preferably at least 80%, still more preferably at least 90%, even more preferably at least 95% and most preferably at least 97%, 98% or 99%; and/or
[0144] c) consists of the supportive peptide or a functionally active variant thereof and at least one amino acid heterologous to the supportive peptide.

[0145] Still another subject of the invention relates to one or more nucleic acid(s) encoding any of the antigenic peptides of subgroup i) as defined above or the one or more protective proteins comprised in the composition of the invention as defined above.

[0146] Nucleic acid molecules of the present invention may be in the form of RNA, such as mRNA or cRNA, or in the form of DNA, including, for instance, cDNA and genomic DNA e.g. obtained by cloning or produced by chemical synthetic techniques or by a combination thereof. The DNA may be triple-stranded, double-stranded or single-stranded. Single-stranded DNA may be the coding strand, also known as the sense strand, or it may be the non-coding strand, also referred to as the anti-sense strand. Nucleic acid molecule as used herein also refers to, among other, single- and double-stranded DNA, DNA that is a mixture of single- and double-stranded RNA, and RNA that is a mixture of single- and double-stranded regions, hybrid molecules comprising DNA and RNA that may be single-stranded or, more typically, double-stranded, or triple-stranded, or a mixture of single- and double-stranded regions. In addition, nucleic acid molecule as used herein refers to triple-stranded regions comprising RNA or DNA or both RNA and DNA.

[0147] The nucleic acid may be a fragment of a nucleic acid occurring naturally in S. pneumoniae, especially in S. pneumoniae strains R6 and TIGR4_Tettelin. The serotype is preferably 1, 2, 3, 4, 5, 6 (especially 6A or 6B), 7 (especially 7F), 8, 9 (especially 9N or 9V), 10 (especially 10A), 11 (especially 11A), 12 (especially 12F), 14, 15 (especially 15B), 17 (especially 17F), 18 (especially 18C), 19 (especially 19A or 19F), 20, 22 (especially 22F), 23 (especially 23F), or 33 (especially 33F). In a preferred embodiment, the serotype is 4, 6B, 14, 19A and 19F or 23F.

[0148] The nucleic acid also includes sequences that are a result of the degeneration of the genetic code. There are 20 natural amino acids, most of which are specified by more than one codon. Therefore, all nucleotide sequences are included in the invention encoding the peptide as defined above.

[0149] Preferably, the one or more nucleic acid(s) comprise(s) or consist(s) of at least one nucleic acid sequence selected from the group consisting of SEQ ID NO:9, SEQ ID NO:10, SEQ ID NO:11, SEQ ID NO:12, and SEQ ID NO:13.

[0150] Additionally, the nucleic acid may contain one or more modified bases. Such nucleic acids may also contain modifications e.g. in the ribose-phosphate backbone to increase stability and half life of such molecules in physiological environments. Thus, DNAs or RNAs with backbones modified for stability or for other reasons are “nucleic acid molecule” as that feature is intended herein. Moreover, DNAs or RNAs comprising unusual bases, such as inosine, or modified bases, such as tritylated bases, to name just two examples, are nucleic acid molecule within the context of the present invention. It will be appreciated that a great variety of modifications have been made to DNA and RNA that serve many useful purposes known to those of skill in the art. The term nucleic acid molecule as it is employed herein embraces such chemically, enzymatically or metabolically modified forms of nucleic acid molecule, as well as the chemical forms of DNA and RNA characteristic of viruses and cells, including simple and complex cells, inter alia. For example, nucleotide substitutions can be made which do not affect the peptide or protein or composition of the invention encoded by the nucleic acid, and thus any nucleic acid molecule which encodes an antigenic peptide or functionally active variant thereof or a composition of the invention as defined above is encompassed by the present invention.

[0151] Furthermore, any of the nucleic acid molecules encoding an antigenic peptide or composition of the invention can be functionally linked, using standard techniques such as standard cloning techniques, to any desired regulatory sequences, whether a S. pneumoniae regulatory sequence or a heterologous regulatory sequence, heterologous leader sequence, heterologous marker sequence or a heterologous coding sequence to create a fusion protein.

[0152] The nucleic acid of the invention may be originally formed in vitro or in a cell in culture, in general, by the manipulation of nucleic acids by endonucleases and/or exonucleases and/or polymerases and/or ligases and/or recombinases or other methods known to the skilled practitioner to produce the nucleic acids.

[0153] In one embodiment of the invention, the one or more nucleic acid(s) of invention is/are located in a vector or a cell other than S. pneumoniae.

[0154] A vector may additionally include nucleic acid sequences that permit it to replicate in the host cell, such as an origin of replication, one or more desired genes and/or selectable marker genes and other genetic elements known in the art such as regulatory elements directing transcription, translation and/or secretion of the encoded peptide or protein. The vector may be used to transduce, transform or infect a cell, thereby causing the cell to express inserted nucleic acids and/or proteins other than those native to the cell. The vector optionally includes materials to aid in achieving entry of the nucleic acid into the cell, such as a viral particle, liposome, protein coating or the like. Numerous types of appropriate expression vectors are known in the art for protein expression, by standard molecular biology techniques. Such vectors are selected from among conventional vector types including insects, e.g., baculovirus expression, or yeast, fungal, bacterial or viral expression systems. Other appropriate expression vectors, of which numerous types are known in the art, can also be used for this purpose. Methods for obtaining such expression vectors are well-known (see, e.g. Sambrook et al (1989), Molecular Cloning. A Laboratory Manual, 2nd edition, Cold Spring Harbor Laboratory, New York). In one embodiment, the vector is a viral vector. Viral vectors include, but are not limited to, retroviral and adenoviral vectors.

[0155] Suitable host cells or cell lines for transfection by this method include bacterial cells. For example, the various strains of E. coli are well-known as host cells in the field of biotechnology. Various strains of B. subtilis, Pseudomonas, Streptomyces, and other bacilli and the like may also be employed in this method. Many strains of yeast cells known to those skilled in the art are also available as host cells for expression of the peptides of the present invention. Other fungal cells or insect cells such as Spodoptera frugipedera (Sf9) cells may also be employed as expression systems. Alternatively, mammalian cells, such as HeLa, C127, BHK, Bowes melanoma cells, human 293 cells, Chinese hamster ovary cells (CHO), the monkey COS-1 cell line, Vero cells, PER.C6® or murine 3T3 cells derived from Swiss, BALB/c or NIH mice may be used. Still other suitable host cells, as well as methods for transfection, culture, amplification, screening, production, and purification are known in the art.

[0156] An antigenic peptide or composition of the invention or component thereof may be produced by expressing a nucleic acid of the invention in a suitable host cell. The host cells can be transfected, e.g. by conventional means such as electroporation with at least one expression vector containing a nucleic acid of the invention under the control of a transcriptional regulatory sequence. The transfected or transformed host cell is then cultured under conditions that allow expression of the protein. The expressed protein is recovered, isolated, and optionally purified from the cell (or from the culture medium, if expressed extracellularly) by appropriate means known to one of skill in the art. For example, the proteins are isolated in soluble form following cell lysis, or extracted using known techniques, e.g. in guanidine chloride. If desired, the peptides or fragments of the invention are produced as a fusion protein. Such fusion proteins are those described above. Alternatively, for example, it may be desirable to produce fusion proteins to enhance expression of the protein in a selected host cell or to improve purification. The molecules comprising the peptides and compositions of this invention may be further purified using any of a variety of conventional methods including, but not limited to: liquid chromatography such as normal or reversed phase, using HPLC, FPLC and the like; affinity chromatography (such as with inorganic ligands or monoclonal antibodies); size exclusion chromatography; immobilized metal chelate chromatography; gel electrophoresis; and the like. One of skill in the art may select the most appropriate isolation and purification techniques without departing from the scope of this invention. Such purification provides the peptide/protein/composition in a form substantially free from other proteinaceous and non-proteinaceous materials of the microorganism.

[0157] A further subject of the invention relates to a pharmaceutical composition, especially a vaccine, comprising at least one protective peptide or functionally active variant thereof according to the invention or the composition according to the invention, and optionally a pharmaceutically acceptable carrier or excipient.

[0158] An antigenic peptide or composition of the invention may be used for methods for immunizing or treating humans and/or animals with the disease caused by infection with S. pneumoniae. Therefore, the antigenic peptide or composition may be used within a pharmaceutical composition. The pharmaceutical composition of the present invention may further encompass pharmaceutically acceptable carriers and/or excipients. The pharmaceutically acceptable carriers and/or excipients useful in this invention are conventional and may include buffers, stabilizers, diluents, preservatives, and solubilizers. Remington's Pharmaceutical Sciences, by E. W. Martin, Mack Publishing Co., Easton, Pa., 15th Edition (1975), describes compositions and formulations suitable for pharmaceutical delivery of the (poly)peptides/proteins herein disclosed.

[0159] If the pharmaceutical composition comprises the components of the invention, the proteins of subgroup i), ii) and/or iii) may be formulated into one or more pharmaceutical composition(s). Additionally, the two or more pharmaceutical compositions may be administered together, simultaneously or consecutively.

[0160] In general, the nature of the carrier or excipients will depend on the particular mode of administration being employed. For instance, parenteral formulations usually comprise injectable fluids that include pharmaceutically and physiologically acceptable fluids such as water, physiological saline, balanced salt solutions, aqueous dextrose, glycerol or the like as a vehicle. For solid compositions (e.g. powder, pill, tablet, or capsule forms), conventional non-toxic solid carriers can include, for example, pharmaceutical grades of mannitol, lactose, starch, or magnesium stearate. In addition to biologically neutral carriers, pharmaceutical compositions to be administered can contain minor amounts of non-toxic auxiliary substances, such as wetting or emulsifying agents, preservatives, and pH buffering agents and the like, for example sodium acetate or sorbitan monolaurate.

[0161] In a preferred embodiment the pharmaceutical composition further comprises an immunostimulatory substance such as an adjuvant. The adjuvant can be selected based on the method of administration and may include mineral oil-based adjuvants such as Freund's complete and incomplete adjuvant, Montanide incomplete Seppic adjuvant such as ISA, oil in water emulsion adjuvants such as the Ribi adjuvant system, syntax adjuvant formulation containing muramyl dipeptide, or aluminum salt adjuvants.

[0162] In a more preferred embodiment the immunostimulatory substance is selected from the group comprising polycationic polymers, especially polycationic peptides such as polyarginine, immunostimulatory deoxynucleotides (ODNs), especially Oligo(dIdC)₁₃, peptides containing at least two LysLeuLys motifs, especially KLKLLLLLKLK, neuroactive compounds, especially human growth hormone, alumn, adjuvants and combinations thereof. Preferably the combination is either a polycationic polymer and immunostimulatory deoxynucleotides or a peptide containing at least two LysLeuLys motifs and immunostimulatory deoxynucleotides. In a still more preferred embodiment the polycationic polymer is a polycationic peptide.

[0163] The term “Oligo(dIdC)₁₃” as used in the present invention means a phosphodiester backboned single-stranded DNA molecule containing 13 deoxy (inosine-cytosine) motifs, also defined by the term [oligo-d(IC)₁₃]. The exact sequence is 5′-dIdCdIdCdIdCdIdCdIdCdIdCdIdCdIdCdIdCdIdCdIdCdIdCdIdC-3′. Oligo(dIdC)₁₃ can also be defined by the terms (oligo-dIC₂₆); oligo-dIC₂₆₋ₘₑᵣ; oligo-deoxy IC, 26-mer; or oligo-dIC, 26-mer, as specified for example in WO 01/93903 and WO 01/93905.

[0164] In an even more preferred embodiment of the invention the immunostimulatory substance is at least one immunostimulatory nucleic acid. Immunostimulatory nucleic acids are e.g. neutral or artificial CpG containing nucleic acids, short stretches of nucleic acids derived from non-vertebrates or in form of short oligonucleotides (ODNs) containing non-methylated cytosine-guanine dinucleotides (CpG) in a defined base context (e.g. as described in WO 96/02555). Alternatively, also nucleic acids based on inosine and cytidine as e.g. described in WO 01/93903, or deoxynucleic acids containing deoxy-inosine and/or deoxyuridine residues (described in WO 01/93905 and WO 02/095027) may preferably be used as immunostimulatory nucleic acids in the present invention. Preferably, mixtures of different immunostimulatory nucleic acids are used in the present invention. Additionally, the aforementioned polycationic compounds may be combined with any of the immunostimulatory nucleic acids as aforementioned. Preferably, such combinations are according to the ones described in WO 01/93905, WO 02/32451, WO 01/54720, WO 01/93903, WO 02/13857, WO 02/095027 and WO 03/047602.

[0165] In addition or alternatively, such vaccine composition may comprise a neuroactive compound. Preferably, the neuroactive compound is human growth factor, e.g. described in WO 01/24822. Also preferably, the neuroactive compound is combined with any of the polycationic compounds and/or immunostimulatory nucleic acids as defined above.

[0166] In a highly preferred embodiment of the invention, the adjuvants are those used in the Example, e.g. complete Freund's adjuvant, aluminum hydroxide. In another highly preferred embodiment of the present invention, the adjuvant is IC31® (Intercell; a synthetic adjuvant comprising the peptide motif KLK [WO 02/32451] and an oligonucleotide [WO 01/93905]).

[0167] The composition may be used e.g. for immunization or treatment of a subject. The pharmaceutical composition encompasses at least one antigenic peptide or composition of the invention; however, it may also contain a cocktail (i.e., a simple mixture) containing different antigenic peptides (including fragments and variants) or proteins or compositions of the invention, optionally mixed with a supportive peptide or protein or different antigenic peptides or proteins of other pathogens. Such mixtures of these peptides, polypeptides, proteins or fragments or variants thereof are useful e.g. in the generation of desired antibodies to a wide spectrum of S. pneumoniae isolates. The (poly)peptide(s)/composition(s) of the present invention may also be used in the form of a pharmaceutically acceptable salt. Suitable acids and bases which are capable of forming salts with the peptides of the present invention are well known to those of skill in the art, and include inorganic and organic acids and bases.

[0168] Alternatively, the pharmaceutical composition comprises
[0169] (i) the one or more nucleic acid(s) of the invention or one or more nucleic acid(s) complementary thereto, and
[0170] (ii) optionally a pharmaceutically acceptable carrier or excipient.

[0171] The nucleic acid sequences, alone or in combination with other nucleic acid sequences encoding peptides/proteins/compositions or antibodies or directed to other pathogenic microorganisms, may further be used as components of a pharmaceutical composition. The composition may be used for immunizing or treating humans and/or animals with the disease caused by infection with S. pneumoniae.

[0172] The pharmaceutically acceptable carrier or excipient may be as defined above.

[0173] In another embodiment, the nucleic acid sequences of this invention, alone or in combination with nucleic acid sequences encoding other antigens or antibodies from other pathogenic microorganisms, may further be used in compositions directed to actively induce a protective immune response in a subject to the pathogen. These components of the present invention are useful in methods for inducing a protective immune response in humans and/or animals against infection with S. pneumoniae.

[0174] For use in the preparation of the therapeutic or vaccine compositions, nucleic acid delivery compositions and methods are useful, which are known to those of skill in the art. The nucleic acid of the present invention or one or more nucleic acid(s) complementary thereto may be employed in the methods of this invention or in the compositions described herein as DNA sequences, either administered as naked DNA, or associated with a pharmaceutically acceptable carrier and provide for in vivo expression of the antigen, peptide or polypeptide. So-called “naked DNA” may be used to express the antigenic peptide or composition of the invention in vivo in a patient. (See, e.g., Cohen, J. (1993), Science 259: 1691-2, which describes similar uses of “naked DNA”). For example, “naked DNA” associated with regulatory sequences may be administered therapeutically or as part of the vaccine composition e.g., by injection.

[0175] Alternatively, a nucleic acid encoding the antigenic peptides or compositions of the invention or a nucleic acid complementary thereto may be used within a pharmaceutical composition, e.g. in order to express the antigenic peptide or composition of the invention in vivo, e.g., to induce antibodies.

[0176] A preferred embodiment of the invention relates to a pharmaceutical composition, wherein the nucleic acid is comprised in a vector and/or a cell other than S. pneumoniae. Vectors and cells suitable in the context of the present invention are described above. Vectors are particularly employed for a DNA vaccine. An appropriate vector for delivery may be readily selected by one of skill in the art. Exemplary vectors for in vivo gene delivery are readily available from a variety of academic and commercial sources, and include, e.g., adeno-associated virus (WO 91/18088), adenovirus vectors (Kay, M. et al (1994), Proc. Natl. Acad. Sci. USA 91: 2353; Ishibashi, S. et al (1993), J. Clin. Invest. 92: 883), or other viral vectors, e.g., various poxviruses, vaccinia, etc. Recombinant viral vectors, such as retroviruses or adenoviruses, are preferred for integrating the exogenous DNA into the chromosome of the cell.

[0177] Also included in the scope of the invention is the production of antibodies against an antigenic peptide or composition according to the invention. This includes, for example, monoclonal and polyclonal antibodies, chimeric, single chain, and humanized antibodies, as well as Fab fragments, or the product of a Fab expression library, which are able to specifically bind to the antigenic peptide or composition according to the invention.

[0178] In a preferred embodiment the antibody is a monoclonal, polyclonal, chimeric or humanized antibody or functionally active fragment thereof. In another preferred embodiment the functionally active fragment comprises a Fab fragment.

[0179] Antibodies generated against the antigenic peptide or composition according to the invention can be obtained by direct injection of the antigenic peptide or composition according to the invention into an animal or administering of the antigenic peptide or composition according to the invention to an animal, preferably a non-human. The antibody so obtained will then bind the antigenic peptide or composition according to the invention. Such antibodies can then be used to isolate reactive antigens, peptide or proteins from tissue expressing those.

[0180] For preparation of monoclonal antibodies, any technique known in the art, which provides antibodies produced by continuous cell line cultures, e.g. a hybridoma cell line, can be used.

[0181] Techniques described for the production of single chain antibodies (U.S. Pat. No. 4,946,778) can be adapted to produce single chain antibodies to the antigenic peptides or compositions according to the invention. Also, transgenic mice or other organisms such as other mammals may be used to express humanized antibodies to of the antigenic peptides or compositions according to the invention.

[0182] Antibodies may be also produced using a hybridoma cell line. Hybridoma cell lines expressing desirable monoclonal antibodies are generated by well-known conventional techniques. The hybridoma cell can be generated by fusing a normal-activated, antibody-producing B cell with a myeloma cell. In the context of the present invention the hybridoma cell is able to produce an antibody specifically binding to the antigenic peptide or composition according to the invention.

[0183] Similarly, desirable high titre antibodies are generated by applying known recombinant techniques to the monoclonal or polyclonal antibodies developed to these peptides/proteins/compositions (see, e.g., WO 86/01533; British Patent Publication No. GB2188638A; Amit et al. (1986), Science 233: 747-53; Queen et al. (1989), Proc. Natl. Acad. Sci. USA 86: 10029-33; WO 90/07861; Riechmann et al. (1988), Nature 332: 323-7; Huse et al. (1988), Science 246: 1275-81).

[0184] Accordingly, another subject of the invention is a method for producing an antibody, characterized by the following steps:
[0185] (a) administering an effective amount of at least one protective peptide or functionally active variant thereof of the invention as defined above and/or a composition of the invention as defined above to an animal; and
[0186] (b) isolating the antibody produced by the animal in response to the administration of step (a) from the animal.

[0187] An alternative method of the invention for producing an antibody is characterized by the following steps:
[0188] (a) contacting a B cell with an effective amount of at least one protective peptide or functionally active variant thereof of the invention as defined above and/or a composition of the invention as defined above;
[0189] (b) fusing the B cell of step (a) with a myeloma cell to obtain a hybridoma cell; and
[0190] (c) isolating the antibody produced by the cultivated hybridoma cell.

[0191] Particularly, the antibody may be produced by initiating an immune response in a non-human animal by administrating an antigenic peptide or composition of the invention to an animal, removing an antibody containing body fluid from said animal, and producing the antibody by subjecting said antibody containing body fluid to further purification steps. Alternatively, the antibody may be produced by initiating an immune response in a non-human animal by administrating an antigenic peptide or composition, as defined in the present invention, to said animal, removing the spleen or spleen cells from said animal and/or producing hybridoma cells of said spleen or spleen cells, selecting and cloning hybridoma cells specific for the antigenic peptide or composition according to the invention and producing the antibody by cultivation of said cloned hybridoma cells. In a preferred embodiment the antibody produced according to a method of the invention is additionally purified. Methods of purification are known to the skilled artisan.

[0192] The antibody may be used in methods for preventing or treating an infection. Accordingly, still another subject of the invention relates to a pharmaceutical composition, especially a vaccine, comprising an antibody produced according to the invention. The pharmaceutical composition may encompass further components as detailed above. The composition may further encompass substances increasing their capacity to stimulate T cells. These include T helper cell epitopes, lipids or liposomes or preferred modifications as described in WO01/78767. Another way to increase the T cell stimulating capacity of epitopes is their formulation with immune stimulating substances for instance cytokines or chemokines like interleukin-2, -7, -12, -18, class I and II interferons (IFN), especially IFN-gamma, GM-CSF, TNF-alpha, flt3-ligand and others.

[0193] A further subject of the invention relates to the use of a protective peptide or functionally active variant thereof of the invention as defined above and/or a composition of the invention as defined above and/or the nucleic acid of the invention as defined above for the manufacture of a medicament for the immunization or treatment of a subject, preferably against S. pneumoniae, more preferably against pneumonia, bacteremia, otitis media, meningitis, sinusitis, peritonitis and/or arthritis caused by S. pneumoniae.

[0194] The peptides, proteins, compositions or the nucleic acids of the invention are generally useful for inducing an immune response in a subject. The vaccine used for immunization may be administered to a subject susceptible to infection by S. pneumoniae, preferably mammals, and still more preferably humans, in any conventional manner, including oral, topical, intranasal, intramuscular, intra-lymph node, intradermal, intraperitoneal, subcutaneous, and combinations thereof, but most preferably through intramuscular injection. The volume of the dose for intramuscular administration is preferably up to about 5 ml, still more preferably between 0.5 ml and 3 ml, and most preferably about 1 to 2 ml. The volume of the dose when subcutaneous injection is the selected administration route is preferably up to about 5 ml, still more preferably between 0.5 ml and 3 ml, and most preferably about 1 to 2 ml. The amount of substance in each dose should be enough to confer effective immunity against and decrease the risk of developing clinical signs resulting from S. pneumoniae infection to a subject receiving a vaccination therewith. Preferably, the unit dose of protein should be up to about 5 μg protein/kg body weight, more preferably between about 0.2 to 3 μg, still more preferably between about 0.3 to 1.5 μg, more preferably between about 0.4 to 0.8 μg, and still more preferably about 0.6 μg. Alternative preferred unit doses of protein could be up to about 6 μg protein/kg body weight, more preferably between about 0.05 to 5 μg, still more preferably between about 0.1 to 4 μg. The dose is preferably administered 1 to 3 times, e.g. with an interval of 1 to 4 weeks. Preferred amounts of protein per dose are from approximately 1 μg to approximately 1 mg, more preferably from approximately 5 μg to approximately 500 μg, still more preferably from approximately 10 μg to approximately 250 μg and most preferably from approximately 25 μg to approximately 100 μg.

[0195] In still another aspect of the invention the antibody produced according to the invention or functional fragment thereof is used for the manufacture of a medicament for the treatment of an infection, preferably a S. pneumoniae infection. The treatment involves administering an effective amount of the antibody to a subject, preferably a mammal, more preferably a human. Thus, antibodies against the protective peptides or variants thereof or the composition of the present invention may be employed to inhibit and/or treat infections, particularly bacterial infections and especially infections arising from S. pneumoniae.

[0196] An “effective amount” of peptides, proteins, compositions or the nucleic acids of the invention or an antibody produced according to the invention may be calculated as that amount capable of exhibiting an in vivo effect, e.g. preventing or ameliorating a sign or symptom of infection, particularly S. pneumoniae infection. Such amounts may be determined by one of skill in the art. Such a substance may be administered in any conventional manner, including oral, topical, intranasal, intramuscular, intra-lymph node, intradermal, intraperitoneal, subcutaneous, and combinations thereof, but preferably intramuscularly or subcutaneously. However, it may also be formulated to be administered by any other suitable route, including orally or topically. The selection of the route of delivery and dosage of such therapeutic compositions is within the skill of the art.

[0197] Treatment in the context of the present invention refers to both therapeutic treatment and prophylactic or preventative measures, wherein the object is to prevent or slow down (lessen) the targeted pathologic condition or disorder. Those in need of treatment include those already with the disorder as well as those prone to have the disorder or those in whom the disorder is to be prevented.

[0198] Still a further subject of the invention relates to a method of diagnosing a S. pneumoniae infection comprising the steps of:
[0199] (a) contacting a sample obtained from a subject with a protective peptide or functionally active variant thereof of the invention as defined above and/or a composition of the invention as defined above; and
[0200] (b) detecting the presence of an antibody against the protective peptide functionally active variant and/or the composition in the sample,
   wherein the presence of the antibody is indicative for the S. pneumoniae infection.

[0201] The antigenic peptides or compositions of the invention may be used for the detection of the S. pneumoniae. Preferably such detection is for diagnosis, more preferably for the diagnosis of a disease, most preferably for the diagnosis of a S. pneumoniae infection. The antigenic peptides or compositions may be used to detect the presence of a S. pneumoniae-specific antibody or fragment thereof e.g. in a sample obtained from a subject. The sample may be e.g. a blood sample. Alternatively, the presence of a S. pneumoniae-specific protective peptide can be detected using an antibody prepared according to the method of the invention.

[0202] The present invention also relates to diagnostic assays such as quantitative and diagnostic assays for detecting levels of the peptides, proteins or antibodies of the present invention in cells and tissues or body fluids, including determination of normal and abnormal levels. Assay techniques that can be used to determine levels of a peptide, a composition or an antibody, in a sample derived from a host are well known to those of skill in the art. Such assay methods include radioimmunoassays, competitive-binding assays, Western Blot analysis and ELISA assays. Among these, ELISAs frequently are preferred. An ELISA assay initially comprises preparing an antibody specific to the peptide or composition, particularly the protective peptide, preferably a monoclonal antibody. In addition, a reporter antibody generally is prepared which binds to the monoclonal antibody. The reporter antibody is attached to a detectable reagent such as radioactive, fluorescent or enzymatic reagent, such as horseradish peroxidase enzyme.

[0203] The antigenic peptides or compositions of the present invention may also be used for the purpose of or in connection with an array. More particularly, at least one of the antigenic peptides or compositions of the present invention may be immobilized on a support. Said support typically comprises a variety of peptides/proteins whereby the variety may be created by using one or several of the peptides or compositions of the present invention. The characterizing feature of such array as well as of any array in general is the fact that at a distinct or predefined region or position on said support or a surface thereof, a distinct polypeptide is immobilized. Because of this any activity at a distinct position or region of an array can be correlated with a specific polypeptide. The number of different peptides or antibodies of the present invention immobilized on a support may range from as little as 10 to several 1000 different peptides or compositions of the present invention. Alternatively, antibodies produced according to the present invention may be used to detect antigenic peptides or compositions of the invention.

[0204] The manufacture of such arrays is known to the one skilled in the art and, for example, described in U.S. Pat. No. 5,744,309. The array preferably comprises a planar, porous or non-porous solid support having at least a first surface. Preferred support materials are, among others, glass or cellulose. It is also within the present invention that the array is used for any of the diagnostic applications described herein. Apart from the peptides or antibodies of the present invention also the nucleic acid molecules according to the present invention may be used for the generation of an array as described above.

[0205] An alternative method for diagnosing an infection with S. pneumoniae comprises the steps of:
[0206] a) contacting a sample obtained from a subject with a primer and/or a probe specific for the one or more nucleic acid(s) of the invention; and
[0207] b) detecting the presence of one or more nucleic acid(s) of the invention in the sample,
   wherein the presence of the one or more nucleic acid(s) is indicative for the S. pneumoniae infection.

[0208] A series of methods for detecting nucleic acids in probes by using specific primers and/or probes is known in the art. In general, these methods are based on the specific binding of a primer or probe to the nucleic acid in question. The methods may involve amplification of the nucleic acid, e.g. RNA or DNA, before the actual detection step. Therefore, primers may be used to specifically induce transcription and/or amplification of RNA or DNA in order to generate a detectable amount of nucleic acid. Suitable well known techniques may be PCR and RT-PCR. Suitable primers and probes for the method of the invention may be produced based on sequence information provided in the present application. Guidelines and computer-assisted programs (e.g. Primer Express®, Applied Biosystems, Foster City, Calif., USA) for designing primers and probes to a specific nucleic acid are known to the person skilled in the art.

[0209] After the amplification step the amplified nucleic acid, in general DNA, may be detected e.g. by its size (e.g. involving agarose gel electrophoresis) or using labeled probes which specifically bind to the amplified nucleic acid. The probes may be labeled with a dye, radioactive marker, a fluorescent marker, an enzyme-linked marker or any other marker.

[0210] For example, FRET (Förster resonance energy transfer) may be used for the detection of the nucleic acid of the invention. In FRET, a donor fluorophore molecule absorbs excitation energy and delivers this via dipole-dipole interaction to a nearby acceptor fluorophore molecule. This process only occurs when the donor and acceptor molecules are sufficiently close to one another. Several different strategies for determining the optimal physical arrangement of the donor and acceptor moieties are known to the skilled practitioner. For this, a fluorescent donor is excited at its specific fluorescence excitation wavelength. By a long-range dipole-dipole coupling mechanism, this excited state is then nonradiatively transferred to a second molecule, the acceptor. The donor returns to the electronic ground state. The described energy transfer mechanism is termed “Förster resonance energy transfer” (FRET). The process involves measuring fluorescence as FRET donor and acceptor moieties are brought together as a result of DNA hybridization. For examples two probes each labeled with a suitable marker hybridize to the nucleic acid of the invention within a distance which allows FRET to occur. Suitable markers include Cyan 500, Cy5, Cy3, SYBR Green I, fluorescein, HEX, Red 610 and Red 640, wherein the two marker involved have to be selected based on there excitation and emission spectrums as known by the skilled person. A suitable system for the detection of nucleic acids is the LightCycler® (Roche Diagnostics).

[0211] A further subject of the invention relates to a method for identifying a ligand capable of binding to a protective peptide or a functionally active variant thereof according to the invention and/or the composition according to the invention comprising:
[0212] (a) providing a test system comprising the peptide and/or composition,
[0213] (b) contacting the test system with a test compound, and
[0214] (c) detecting a signal generated in response to the binding of the test compound to the peptide and/or composition.

[0215] More particularly, the method may be carried out by contacting an isolated or immobilized antigenic peptide or composition according to the invention with a candidate ligand under conditions to permit binding of the candidate ligand to the peptide, wherein the test system comprises a component capable of providing a detectable signal in response to the binding of the candidate ligand to said peptide; and detecting the presence or absence of a signal generated in response to the binding of the ligand to the peptide. The ligand may be an agonist or an antagonist.

[0216] Test systems for detection binding of a ligand are known to the skilled artisan and include e.g. binding assays with labeled ligand such as radioligands, fluorescence-labeled ligands or enzyme-labeled ligands.

[0217] The test compound can be any test compound either naturally occurring or chemically synthesized. Naturally occurring test compounds include in particular antibodies, preferably those showing similarity to the antibodies of the invention. In one preferred embodiment of the invention the test compound is provided in the form of a chemical compound library. Chemical compound libraries include a plurality of chemical compounds and have been assembled from any of multiple sources, including chemically synthesized molecules and natural products, or have been generated by combinatorial chemistry techniques. They are especially suitable for high throughput screening. They may be comprised of chemical compounds of a particular structure or compounds of a particular creature such as a plant.

[0218] A further subject of the invention relates to the use of the protective peptide or a functionally active variant thereof according to the invention or the composition according to the invention for the isolation and/or purification and/or identification of an interaction partner of the antigenic peptide and/or composition. The isolation and/or purification and/or identification of the ligand may be carried out as detailed above or as known to the person skilled in the art. In a preferred embodiment of the invention an affinity device may be used. The affinity device may comprise as least a support material and any antigenic peptide or composition according to the present invention, which is attached to the support material. Because of the specificity of the antigenic peptides and/or compositions according to the present invention for their target cells or target molecules or their interaction partners, the antigenic peptides and/or compositions allow a selective removal of their interaction partner(s) from any kind of sample applied to the support material provided that the conditions for binding are met. The sample may be a biological or medical sample, including but not limited to, fermentation broth, cell debris, cell preparation, tissue preparation, organ preparation, blood, urine, lymph liquid, liquor and the like. The peptide or composition may be attached to the matrix in a covalent or non-covalent manner. Suitable support material is known to the one skilled in the art and can be selected from the group comprising cellulose, silicon, glass, aluminum, paramagnetic beads, starch and dextrane.

[0219] The present invention is further illustrated by the following Figures, Examples and the Sequence Listing, from which further features, embodiments and advantages may be taken. It is to be understood that the present examples are given by way of illustration only and not by way of limitation of the disclosure.

### FIGURE LEGENDS

[0220] FIG. 1 shows the protection achieved by active immunization with selected S. pneumoniae antigens in a mouse lethality model. C3H/HeN mice (10 mice per group) were immunized with recombinant antigens cloned from the serotype 4 S. pneumoniae strain TIGR4_IC and challenged with a serotype 6B strain Pj-1259. Survival was monitored for 2 weeks post-challenge. Mice were immunized subcutaneously with 50 μg of the respective recombinant protein adjuvanted with either aluminum hydroxide (ALUM) (A) or CFA/IFA (B). Mice were then challenged intraperitoneally with 10⁴ cfu S. pneumoniae 6B. Adjuvant control mice were used as negative controls, while PspA (SP0117) served as positive control. Survival was monitored for 15 days post challenge and was depicted as percentage of total animals.

[0221] FIG. 2 shows the protection achieved by active immunization with a combination of selected S. pneumoniae antigens in combination with SP1732-3 and SP2216-1 in a mouse lethality model. C3H/HeN mice (10 mice per group) were immunized with a combination of recombinant antigens cloned from the serotype 4 S. pneumoniae strain TIGR4_IC and challenged with a serotype 6B strain Pj-1259. Survival was monitored for 2 weeks post-challenge. Mice were immunized subcutaneously with a mixture of 50 μg of each recombinant protein antigen adjuvanted with aluminum hydroxide (ALUM). Mice were then challenged intraperitoneally with 10⁴ cfu S. pneumoniae 6B. Adjuvant control mice were used as negative controls, while PspA (SP0117) served as positive control. Survival was monitored for 15 days post challenge and was depicted as percentage of total animals. (In A and B two different experiments are depicted).

[0222] FIG. 3 shows the protection achieved by active immunization with a combination of selected S. pneumoniae antigens in combination with SP1732-3 and SP1650 (PsaA) in a mouse lethality model. C3H/HeN mice (10 mice per group) were immunized with a combination of recombinant antigens cloned from the serotype 4 S. pneumoniae strain TIGR4_IC and challenged with the serotype 6B strain Pj-1259. Survival was monitored for 2 weeks post-challenge. Mice were immunized subcutaneously with a mixture of 50 μg of each recombinant protein antigen adjuvanted with aluminum hydroxide (ALUM). Mice were then challenged intraperitoneally with 10⁴ cfu S. pneumoniae 6B. Adjuvant control mice were used as negative controls, while PspA (SP0117) served as positive control. Survival was monitored for 15 days post challenge and was depicted as percentage of total animals. (In A and B two different experiments are depicted).

[0223] FIG. 4 shows the protection achieved by active immunization with selected S. pneumoniae antigens in a pneumonia model. CD-1 mice (10 mice per group) were subcutaneously immunized with 50 μg protein antigen adjuvanted with ALUM. (A) Mice were intranasally challenged with 10⁵ cfu S. pneumoniae WU2 (serotype 3). Adjuvant control mice were used as negative controls, while PspA (SP0117) and lysate (WU2) served as positive control. (B) Mice were intranasally challenged with 5×10⁷ cfu S. pneumoniae EF3030. Adjuvant control mice were used as negative controls, while PspA (SP0117) and Prevnar served as positive controls. As read-out for pneumonia, lungs were removed at day 3 under sterile conditions, homogenized and cultures of lung homogenates were quantitatively plated on blood agar plates. Cfus per organ were determined for each individual mouse (10 mice/group).

[0224] FIG. 5 shows the protection achieved by active immunization with a combination of selected S. pneumoniae antigens in combination with SP1732-3 and SP2216-1 in a pneumonia model. CD-1 mice (10 mice per group) were subcutaneously immunized with 50 μg protein antigen adjuvanted with ALUM. (A) Mice were intranasally challenged with 10⁵ cfu S. pneumoniae WU2 (serotype 3). Adjuvant control mice were used as negative controls, while PspA (SP0117) and lysate served as positive control. (B) Mice were intranasally challenged with 5×10⁷ cfu S. pneumoniae EF3030 (serotype 19F). Adjuvant control mice were used as negative controls, while PspA (SP0117) and Prevnar served as positive controls. As read-out for pneumonia, lungs were removed at day 3 under sterile conditions, homogenized and cultures of lung homogenates were quantitatively plated on blood agar plates. Cfus per organ were determined for each individual mouse (10 mice/group).

[0225] FIG. 6 shows the protection achieved by active immunization with selected S. pneumoniae antigens in a mouse lethality model. C3H/HeN mice (10 mice per group) were immunized with recombinant antigens cloned from the TIGR4_IC or Pj-1259 S. pneumoniae strains and challenged with a serotype 6B strain Pj-1259. Survival was monitored for 14 days post-challenge. Mice were immunized subcutaneously with 50 μg SP2216-1, SP1732-3, PsaA or combinations of these antigens adjuvanted with either aluminum hydroxide (ALUM) or IC31® (100 nmol KLKLLLLLKLK; 4 nmol ODN1a ([dIdC]13)). Mice were then challenged intraperitoneally with 10⁴ cfu S. pneumoniae 6B. Adjuvant control mice were used as negative controls, while PspA (SP0117) served as positive control. Percentage of survival is depicted either on day 7 (A) or on day 14 (B). Two independent experiments using aluminum hydroxide (black bars) or two independent experiments using IC31® (white bars) as adjuvant are depicted.

[0226] FIG. 7 shows the protection achieved by active immunization with SP1732-3 and SP2216-1 in an intranasal mouse sepsis model. NMRI mice (10 mice per group) were subcutaneously immunized with 50 μg protein antigen adjuvanted with CFA/IFA. Mice were intranasally challenged with 5×10⁶ cfu S. pneumoniae 6301 (serotype 1). Adjuvant control mice were used as negative controls, while PspA (SP0117) served as positive control. Survival was monitored for 16 days post challenge and was depicted as percentage of total animals.

[0227] FIG. 8 shows the protection achieved by active immunization with SP1732-3 and SP2216-1 in an intravenous mouse sepsis model. CBA/N mice (10 mice per group) were subcutaneously immunized with 50 μg protein antigen adjuvanted with CFA/IFA. Mice were intravenously challenged with 5×10⁴ cfu S. pneumoniae TIGR4_DB (serotype 4). Adjuvant control mice were used as negative controls, while PspA (SP0117) served as positive control. Survival was monitored for 12 days post challenge and was depicted as percentage of total animals.

[0228] FIG. 9 shows the protection achieved by active immunization with SP1732-3 and SP2216-1 in a pneumonia model. CBA/N mice (10 mice per group) were subcutaneously immunized with 50 μg protein antigen adjuvanted with CFA/IFA. Mice were intravenously challenged with 10⁷ cfu S. pneumoniae EF3030 (serotype 19F). Adjuvant control mice were used as negative controls, while PspA (SP0117) served as positive control. As read-out for pneumonia, lungs were removed at day 6 after challenge under sterile conditions, homogenized and cultures of lung homogenates were quantitatively plated on blood agar plates. Cfus per organ were determined for each individual mouse (5-10 mice/group).

[0229] FIG. 10 shows the protection level achieved by active immunization with SP1732-3, SP2216-1 and SP1650 (PsaA) as well as combinations of SP1732-3, SP2216-1 (and SP1650) in a pneumonia model. CD-1 mice (10 mice per group) were subcutaneously immunized with 50 μg protein antigen adjuvanted with aluminum hydroxide (ALUM). Mice were intranasally challenged with (A) 10⁵ cfu S. pneumoniae WU2 (serotype 3) or (B) 5×10⁷ cfu S. pneumoniae EF3030 (serotype 19F). Adjuvant control mice were used as negative controls, while PspA (SP0117), Prevnar, and/or lysate served as positive controls. As read-out for pneumonia, lungs were removed at day 3 after challenge under sterile conditions, homogenized and cultures of lung homogenates were quantitatively plated on blood agar plates. Cfus per organ were determined for each individual mouse. A summary of 2 or 3 experiments is shown (10 mice/group/experiment). Statistical significance (Mann-Whitney two sample rank test) is indicated with star(s).

[0230] FIG. 11 shows the protection level achieved by active immunization with the combination of SP1732-3 and SP2216-1 or with combinations of SP1732-3, SP2216-1 and SP1650 (PsaA) in a mouse lethality model. C3H/HeN mice (10 mice per group) were immunized (A) subcutaneously or (B) intramuscularly with the respective combination of recombinant antigens adjuvanted with ALUM. Mice were intraperitoneally challenged with 10⁴ cfu S. pneumoniae 6B. Adjuvant control mice were used as negative controls, while PspA (SP0117) served as positive control. Survival was monitored for 12 days post challenge and was depicted as percentage of total animals.

[0231] FIG. 12 shows the protection level achieved by active immunization with the combination of SP1732-3 and SP2216-1 or with combinations of SP1732-3, SP2216-1 and SP1650 (PsaA) in an intranasal mouse sepsis model. NMRI mice (10 mice per group) were subcutaneously immunized with 50 μg protein antigen adjuvanted with ALUM. Mice were intranasally challenged with 5×10⁶ cfu S. pneumoniae 6301 (serotype 1). Adjuvant control mice were used as negative controls, while PspA (SP0117) served as positive control. Survival was monitored for 10 days post challenge and was depicted as percentage of total animals.

### EXAMPLES

### Example 1

### Cloning and Expression of Recombinant Pneumococcal Antigens, their Sequence Analyses and Identification of Conserved Antigens

### Experimental Procedures

[0232] Cloning of genes/DNA fragments: The gene/DNA fragment of interest was amplified from genomic DNA of the S. pneumoniae serotype 6B strain Pj-1259 or serotype 4 strain TIGR4_IC by PCR using gene specific primers. Apart from the gene specific part, the primers had restriction sites that aided in a directional cloning of the amplified PCR product. The gene annealing (specific) part of the primer ranged between 15-30 bases in length. The PCR products obtained were digested with the appropriate restriction enzymes and cloned into the pET28b (+) vector (Novagen) for His-tagged proteins. The constructs are listed in Table 1. Once the recombinant plasmid was confirmed to contain the gene of interest, E. coli BL21 Star® cells (Invitrogen) that served as expression host were transformed.

TABLE 1
List of genes selected for expression.

| | | | | | aa | nt | Seq ID |
|---|---|---|---|---|---|---|---|
| Construct | Gene | Strain | Vector | RE | (start/stop) | (start/stop) | (aa, nt) |
| 1 | SP0498 | TIGR4_IC | pET28b(+) | BamHI/NotI | 881-1658 | 2641-4974 | 1, 9 |
| 2 | SP0609 | TIGR4_IC | pET28b(+) | NcoI/NotI | 1-254* | 1-762 | 2, 10 |
| 3 | SP0749 | TIGR4_IC | pET28b(+) | NcoI/NotI | 28-386 | 82-1158 | 3, 11 |
| 4 | SP2027 | TIGR4_IC | pET28b(+) | NcoI/XhoI | 2-136 | 4-408 | 4, 12 |
| 5 | SP2194 | TIGR4_IC | pET28b(+) | NcoI/NotI | 2-810** | 4-2430 | 5, 13 |
| 6 | SP2216-1 | TIGR4_IC | pET28b(+) | NcoI/NotI | 28-278 | 82-834 | 6, 14 |
| 7 | SP1732-3 | Pj-1259 | pET28b(+) | NcoI/XhoI | 345-659 | 1033-1977 | 7, 15 |
| 8 | SP1650 | Pj-1259 | pET28b(+) | NcoI/XhoI | 21-309 | 61-927 | 8, 16 |
| | (PsaA) | | | | | | |

The nomenclature and the numbering of the genes is derived from the published genome of S. pneumoniae TIGR4_Tettelin. The restriction sites (RE) used for cloning and the position (start/stop) of the amplicons are indicated for each construct.
*The residue Serine at position 50 relative to the native protein was changed to a Proline according to the sequence confirmation of the expression construct.
**The residue Glutamic acid at position 9 relative to the native protein was changed to a Glycine according to the sequence confirmation of the expression construct.
Both mutations could be due to PCR amplification or be mutations in the particular TIGR4_IC strain used for PCR amplification.

### Expression and Purification of Proteins:

[0233] E. coli BL21 Star® cells harboring the recombinant plasmid were grown into log phase in the required culture volume. Once an OD₆₀₀ₙₘ of 0.6 was reached the culture was induced with 0.5 mM IPTG for 3 hours at 37° C. The cells were harvested by centrifugation, lysed by a combination of the freeze-thaw method followed by disruption of cells with ‘Bug-Buster®, (Novagen). The lysate was separated by centrifugation into soluble (supernatant) and insoluble (pellet) fractions. Depending on the location of the protein different purification strategies were applied.

[0234] A) If the His-tagged protein was in the soluble fraction, protein purification was done by binding the supernatant to Ni-Sepharose beads (Ni-Sepharose™ 6 Fast Flow, GE Healthcare). Due to the presence of the hexa Histidine (6×HIS) at the C terminus of the expressed protein, it bound to the Ni-Sepharose while the other contaminating proteins were washed from the column by wash buffer. The protein was eluted by 500 mM Imidazole in 20 mM NaH₂PO₄, 0.5 mM NaCl buffer at pH 7.4. The eluate was concentrated, assayed by Bradford or BCA for protein concentration and checked by SDS-PAGE and Western blot.

[0235] B) If the protein was present in the insoluble fraction the pellet was solubilized in suitable buffer containing 8 M Urea and applied onto the Ni-NTA column under denaturing conditions (in buffer containing 8 M Urea) using the same materials and procedure as mentioned above. Contaminating proteins were washed from the column by wash buffer without urea. Refolding of the His-tagged protein was performed while the protein was immobilized on the Ni-NTA matrix. After renaturation, proteins were eluted by the addition of 500 mM Imidazole. The eluate was dialyzed to remove traces of urea and concentrated if the volume was large, checked by SDS-PAGE and measured by the Bradford or BCA method.

### Preparation of Streptococcal Genomic DNA

[0236] 5 ml Todd-Hewitt Broth medium were inoculated with the respective strain of S. pneumoniae from a frozen stab and grown without shaking at 37° C. overnight. 4 ml of the culture were then harvested by centrifuging at 13,000 rpm in a biofuge fresco (Heraeus) for 5 min and the supernatant was removed. DNA was isolated from the bacterial cell pellets following the protocol of Wizard® Genomic DNA Purification Kit (Promega). The DNA pellets were finally dried on air and dissolved in 70 μl ddH₂O.

### PCR Amplification of Pneumococcal Antigens

[0237] PCR was performed on a series of independent S. pneumoniae isolates (Table 2) with primers specific for the gene of interest. Oligonucleotide sequences as primers were designed for the three vaccine candidates using the public program Primer3 (http://frodo.wi.mit.edu/cgi-bin/primer3/primer3_www_slow.cgi). Oligonucleotide sequences as primers for PCR were designed for the selected antigens in order to be able to amplify the full gene. Genomic DNA of all S. pneumoniae strains was prepared as described above. PCR was performed in a reaction volume of 25 μl using Taq polymerase (1 U), 200 nM dNTPs, 10 pMol of each oligonucleotide, app. 10 to 20 ng DNA and a kit according to the manufacturers instructions (Invitrogen, The Netherlands). As standard, 30 cycles (1×: 5 min. 95° C., 30×: 30 sec. 95° C., 30 sec. 56° C., 120 sec. 72° C., 1×: 4 min. 72° C.) were performed, unless conditions had to be adapted for individual primer pairs. The PCR amplification was performed in a Biometra T3 Thermocycler.

[0238] All negative PCR reactions in the first amplification round were repeated applying the following conditions:

[0239] 5 μl genomic DNA (diluted 1:33 in ddH₂O; approx. 10 to 20 ng)

[0240] 2.5 μl 10× buffer (Invitrogen Taq Polymerase I)

[0241] 1.0 μl 50 mM MgCl₂

[0242] 2.5 μl 2 mM dNTPs

[0243] each 1 μl 10 pM oligonucleotides

[0244] 0.2 μl Invitrogen Taq Polymerase I (5 U/μl)

[0245] 11.8 μl ddH₂O

[0246] The DNA samples were subsequently visualized by electrophoresis on a 1% agarose gel and stained with ethidium bromide (EtBr). If possible, the oligonucleotide design was performed to incorporate all regions, which were identified as antigenic. In cases, where the gene was smaller than 1,000 bp, the entire gene was used for the analysis. All oligonucleotides are listed in Table 3.

[0247] The two point mutations mentioned in Table 1 (marked with * and **) may be due to PCR amplification. Accordingly, the respective sequences of the protective peptides of SP0609 and SP2194 without these point mutations are shown as SEQ ID NO: 17 and 18, respectively.

TABLE 2
S. pneumoniae strains utilized for the present study.

| No. | Strain | Serotype |
|---|---|---|
| 1 | Pj-102-59 | 18C |
| 2 | Pj-102-62 | 23F |
| 3 | Pj-102-70 | 23F |
| 4 | Pj-102-77 | 3 |
| 5 | Pj-102-93 | 19F |
| 6 | Pj-102-94 | 7F |
| 7 | Pj-102-98 | 6B |
| 8 | Pj-102-113 | 4 |
| 9 | Pj-102-148 | 3 |
| 10 | Pj-102-160 | 9V |
| 11 | Pj-102-161 | 9V |
| 12 | Pj-102-163 | 7F |
| 13 | Pj-102-174 | 4 |
| 14 | Pj-102-228 | 19F |
| 15 | Pj-102-386 | 6B |
| 16 | Pj-102-468 | 18C |
| 17 | Pj-1344 | 1 |
| 18 | Pj-1364 | 14 |
| 19 | Pj-1484 | 14 |
| 20 | Pj-1490 | 1 |
| 21 | Pj-1228 | 1 |
| 22 | Pj-1229 | 19F |
| 23 | Pj-1230 | 3 |
| 24 | Pj-1231 | 8 |
| 25 | Pj-1232 | 19A |
| 26 | Pj-1233 | 19A |
| 27 | Pj-1234 | 14 |
| 28 | Pj-1236 | 9N |
| 29 | Pj-1237 | 7F |
| 30 | Pj-1241 | 6A |
| 31 | Pj-1242 | 18C |
| 32 | Pj-1244 | 4 |
| 33 | Pj-1248 | 23F |
| 34 | Pj-1250 | 6B |
| 35 | Pj-1255 | 9V |
| 36 | Pj-1262 | 9N |
| 37 | Pj-1279 | 6A |
| 38 | Pj-1283 | 33F |
| 39 | Pj-1284 | 17F |
| 40 | Pj-1291 | 22F |
| 41 | Pj-1297 | 35A |
| 42 | Pj-1298 | 8 |
| 43 | Pj-1300 | 22F |
| 44 | Pj-1322 | 35F |
| 45 | Pj-1330 | 17F |
| 46 | Pj-1345 | 12F |
| 47 | Pj-1347 | 12F |
| 48 | Pj-1369 | 35F |
| 49 | Pj-1386 | 33F |
| 50 | PBI-71 | 5 |
| 51 | I-33_Andersson | 3 |
| 52 | Pj-1291_Andersson | 22F |
| 53 | TIGR4_DB* | 4 |
| 54 | TIGR4_IC* | 4 |

*The TIGR4_DB (Ren, B., et al. (2003), Infect Immun. 71: 75-85) and TIGR4_IC strains are distinct from the TIGR4_Tettelin strain (Tettelin et al. (2001), Science 293: 498-506) used for sequence comparison, as publicly available in genomic databases.

TABLE 3
Oligonucleotides used for sequence conservation analyses. Shown are the ORF
and primer names, SEQ ID NOs, orientation of the primer relative to the gene,
the sequence, and the position relative to the gene. Oligonucleotides were
used for both PCR amplification of the gene or gene fragment and subsequent
sequence analyses.

| | | | | Position |
|---|---|---|---|---|
| | Primer name | | | relative to |
| ORF | (Seq ID) | Orientation | Sequence | gene |
| SP0498 | ICC5875 | sense | TGTGATTATCATGGTTCTAGAGTTTGA | −92 to −65 |
| | (Seq ID 19) | | | |
| | ICC6198 | sense | TGCAAACAGTTATTGGTTTTTGTC | −138 to −114 |
| | (Seq ID 20) | | | |
| | ICC5876 | antisense | GGATGGTTTACCTTAGCAGCA | 1079 to 1100 |
| | (Seq ID 21) | | | |
| | ICC5877 | sense | TGATGGCTATTTCATCAACCA | 986 to 1007 |
| | (Seq ID 22) | | | |
| | ICC5878 | antisense | CGCTTCTTGGGCATTTTTAAG | 2157 to 2178 |
| | (Seq ID 23) | | | |
| | ICC5879 | sense | CGAGCATGAAGGTGCTGTAA | 2045 to 2065 |
| | (Seq ID 24) | | | |
| | ICC5880 | antisense | CCACCTCTAAGGTCCAAATCC | 3233 to 3254 |
| | (Seq ID 25) | | | |
| | ICC5881 | sense | CCTAGCAGTTTCCGTTCCAA | 3143 to 3163 |
| | (Seq ID 26) | | | |
| | ICC5882 | antisense | CACTTGCTTGAACACGCTCT | 4205 to 4225 |
| | (Seq ID 27) | | | |
| | ICC5883 | sense | CAGAGTCTAAAAGATCTGGTTGCTT | 4080 to 4105 |
| | (Seq ID 28) | | | |
| | ICC5884 | antisense | TTTGCCATGTTACAAAAACTCC | 5055 to 5077 |
| | (Seq ID 29) | | | |
| SP0609 | ICC5885 | sense | TTGACAATCCAAGCGAACCT | −116 to −96 |
| | (Seq ID 30) | | | |
| | ICC5886 | antisense | AAGAGGAAACCATTGAAAAATTG | 822 to 845 |
| | (Seq ID 31) | | | |
| SP0749 | ICC5887 | sense | TCATCGAAAAAGTTCAAGGAAAA | −90 to −67 |
| | (Seq ID 32) | | | |
| | ICC5888 | antisense | CGTTGACGCAGTTTGAAGAG | 1233 to 1253 |
| | (Seq ID 33) | | | |
| | ICC5889 | sense | TAGCGAACGCTACAAAAGCA | 373 to 393 |
| | (Seq ID 34) | | | |
| SP2027 | ICC5890 | sense | CCAGACCCTTGGTATACAGGA | −97 to −76 |
| | (Seq ID 35) | | | |
| | ICC5891 | antisense | TTGCTTGGAAGAGGGATTTG | 480 to 500 |
| | (Seq ID 36) | | | |
| SP2194 | ICC5892 | sense | CTTTGGATCGCGTTTTAGGA | −93 to −73 |
| | (Seq ID 37) | | | |
| | ICC5893 | antisense | GCCAAGGCTGGTTTCAAGAT | 975 to 995 |
| | (Seq ID 38) | | | |
| | ICC5894 | sense | TGAAGAAGATGGCCAAGTCA | 881 to 901 |
| | (Seq ID 39) | | | |
| | ICC5895 | antisense | AGACACCGTCATCCAGAACC | 1907 to 1927 |
| | (Seq ID 40) | | | |
| | ICC5896 | sense | GGAGCTCCTCCAGGCTATGT | 1773 to 1793 |
| | (Seq ID 41) | | | |
| | ICC5897 | antisense | GCGGCTAGCTGCCTAGTTT | 2500 to 2519 |
| | (Seq ID 42) | | | |
| | ICC6004 | antisense | AACGATCCGTGGTTTTCATC | 2613 to 2633 |
| | (Seq ID 43) | | | |
| | ICC6279 | antisense | GATAGAGCTGACGTGGTTTGAAGAGATT | 2550 to 2578 |
| | (Seq ID 44) | | | |

Sequence Analyses of S. pneumoniae Genes

[0248] In order to determine the sequence of an antigen from diverse S. pneumoniae strains, PCR was performed with primers specific for the gene of interest as described above. S. pneumoniae strains used for these analyses are shown in Table 2. Sequencing was performed with dedicated primers using the PCR products as templates. The sequences of the oligonucleotides are listed in Table 3. Genomic DNA of all S. pneumoniae strains was prepared as described above. PCR was performed in a reaction volume of 25 μl as described above, unless conditions had to be adapted for individual primer pairs. PCR samples were sequenced with the oligonucleotides as listed in Table 3. Sequencing was performed at Agowa (Germany).

### Results

### The Selected Pneumococcal Antigens are Highly Conserved

[0249] The PCR and sequencing of the 5 selected genes was performed as described under Methods. Table 2 shows the strains used for sequencing, while Table 3 lists the oligonucleotides employed for the PCR and sequencing analyses. Overall, Table 9 lists all strains for which sequences of the respective genes were determined. Those strains have been compared to the Reference strain S. pneumoniae TIGR4 (Tettelin et al. (2001), Science 293: 498-506); herein designated as TIGR4_Tettelin. Accordingly, the Reference positions in Tables 4 to 8 refer to the respective position of S. pneumoniae TIGR4_Tettelin.

### Sequence Analyses of SP0498

[0250] Sequences were obtained from 51 pneumococcal strains. The level of amino acid sequence identity ranged from 98.2% to 100% as compared to the sequence of SP0498 from S. pneumoniae TIGR4_Tettelin. Table 4 lists all 119 amino acid positions which showed a distinct amino acid as compared to SP0498 from the Reference strain S. pneumoniae TIGR4_Tettelin.

TABLE 4
Gene conservation of SP0498.

| | | | | | Strains with | Strains with |
|---|---|---|---|---|---|---|
| Reference | Alignment | Amino acid in | | | respective | respective |
| position | position | Reference | AA change¹ | AA change² | change¹ | change² |
| 32 | 32 | A | V | | Pj-1364, Pj-1233, Pj-1234 | |
| 47 | 47 | G | R | | Pj-102-94, Pj-102-163, Pj-1237 | |
| 50 | 50 | T | P | | Pj-102-59, Pj-1231, Pj-1298, Pj-1386 | |
| 61 | 61 | T | I | | Pj-102-77 | |
| 69 | 69 | E | K | | Pj-102-161 | |
| 73 | 73 | A | T | | Pj-102-77, Pj-102-93, Pj-102-160, Pj- | |
| | | | | | 1364, Pj-1484, Pj-1233, Pj-1234, Pj- | |
| | | | | | 1248, Pj-1255, Pj-1297, Pj-1322, Pj- | |
| | | | | | 1330, Pj-1369 | |
| 81 | 81 | A | — | | Pj-1236, Pj-1262, Pj-1300 | |
| 82 | 82 | E | — | | Pj-1236, Pj-1262, Pj-1300 | |
| 83 | 83 | G | — | A | Pj-1236, Pj-1262, Pj-1300 | Pj-1230 |
| 84 | 84 | V | — | | Pj-1236, Pj-1262, Pj-1300 | |
| 85 | 85 | A | — | | Pj-1236, Pj-1262, Pj-1300 | |
| 86 | 86 | I | — | T | Pj-1236, Pj-1262, Pj-1300 | Pj-102-77, Pj- |
| | | | | | | 102-93, Pj-102- |
| | | | | | | 94, Pj-102-148, |
| | | | | | | Pj-102-160, Pj- |
| | | | | | | 102-163, Pj- |
| | | | | | | 1364, Pj-1484, |
| | | | | | | Pj-1229, Pj- |
| | | | | | | 1230, Pj-1233, |
| | | | | | | Pj-1234, Pj- |
| | | | | | | 1237, Pj-1241, |
| | | | | | | Pj-1248, Pj- |
| | | | | | | 1255, Pj-1279, |
| | | | | | | Pj-1291, Pj- |
| | | | | | | 1297, Pj-1322, |
| | | | | | | Pj-1330, Pj- |
| | | | | | | 1369, PBI-71 |
| 87 | 87 | A | — | | Pj-1236, Pj-1262, Pj-1300 | |
| 88 | 88 | S | — | | Pj-1236, Pj-1262, Pj-1300 | |
| 89 | 89 | E | — | | Pj-1236, Pj-1262, Pj-1300 | |
| 90 | 90 | T | — | | Pj-1236, Pj-1262, Pj-1300 | |
| 91 | 91 | A | — | | Pj-1236, Pj-1262, Pj-1300 | |
| 92 | 92 | S | — | | Pj-102-59, Pj-102-77, Pj-102-93, Pj- | |
| | | | | | 102-160, Pj-1364, Pj-1484, Pj-1229, Pj- | |
| | | | | | 1231, Pj-1233, Pj-1236, Pj-1241, Pj- | |
| | | | | | 1248, Pj-1255, Pj-1262, Pj-1283, Pj- | |
| | | | | | 1297, Pj-1298, Pj-1300, Pj-1322, Pj- | |
| | | | | | 1330, Pj-1369, Pj-1386, PBI-71 | |
| 93 | 93 | P | — | | Pj-102-59, Pj-102-77, Pj-102-93, Pj- | |
| | | | | | 102-160, Pj-1364, Pj-1484, Pj-1229, Pj- | |
| | | | | | 1231, Pj-1233, Pj-1236, Pj-1241, Pj- | |
| | | | | | 1248, Pj-1255, Pj-1262, Pj-1283, Pj- | |
| | | | | | 1297, Pj-1298, Pj-1300, Pj-1322, Pj- | |
| | | | | | 1330, Pj-1369, Pj-1386, PBI-71 | |
| 94 | 94 | A | — | | Pj-102-59, Pj-102-77, Pj-102-93, Pj- | |
| | | | | | 102-160, Pj-1364, Pj-1484, Pj-1229, Pj- | |
| | | | | | 1231, Pj-1233, Pj-1236, Pj-1241, Pj- | |
| | | | | | 1248, Pj-1255, Pj-1262, Pj-1283, Pj- | |
| | | | | | 1297, Pj-1298, Pj-1300, Pj-1322, Pj- | |
| | | | | | 1330, Pj-1369, Pj-1386, PBI-71 | |
| 95 | 95 | S | — | | Pj-102-59, Pj-102-77, Pj-102-93, Pj- | |
| | | | | | 102-160, Pj-1364, Pj-1484, Pj-1229, Pj- | |
| | | | | | 1231, Pj-1233, Pj-1236, Pj-1241, Pj- | |
| | | | | | 1248, Pj-1255, Pj-1262, Pj-1283, Pj- | |
| | | | | | 1297, Pj-1298, Pj-1300, Pj-1322, Pj- | |
| | | | | | 1330, Pj-1369, Pj-1386, PBI-71 | |
| 96 | 96 | N | — | | Pj-102-59, Pj-102-77, Pj-102-93, Pj- | |
| | | | | | 102-160, Pj-1364, Pj-1484, Pj-1229, Pj- | |
| | | | | | 1231, Pj-1233, Pj-1236, Pj-1241, Pj- | |
| | | | | | 1248, Pj-1255, Pj-1262, Pj-1283, Pj- | |
| | | | | | 1297, Pj-1298, Pj-1300, Pj-1322, Pj- | |
| | | | | | 1330, Pj-1369, Pj-1386, PBI-71 | |
| 97 | 97 | E | — | | Pj-102-59, Pj-102-77, Pj-102-93, Pj- | |
| | | | | | 102-160, Pj-1364, Pj-1484, Pj-1229, Pj- | |
| | | | | | 1231, Pj-1233, Pj-1236, Pj-1241, Pj- | |
| | | | | | 1248, Pj-1255, Pj-1262, Pj-1283, Pj- | |
| | | | | | 1297, Pj-1298, Pj-1300, Pj-1322, Pj- | |
| | | | | | 1330, Pj-1369, Pj-1386, PBI-71 | |
| 98 | 98 | A | — | | Pj-102-59, Pj-102-77, Pj-102-93, Pj- | |
| | | | | | 102-160, Pj-1364, Pj-1484, Pj-1229, Pj- | |
| | | | | | 1231, Pj-1233, Pj-1236, Pj-1241, Pj- | |
| | | | | | 1248, Pj-1255, Pj-1262, Pj-1283, Pj- | |
| | | | | | 1297, Pj-1298, Pj-1300, Pj-1322, Pj- | |
| | | | | | 1330, Pj-1369, Pj-1386, PBI-71 | |
| 99 | 99 | A | — | | Pj-102-59, Pj-102-77, Pj-102-93, Pj- | |
| | | | | | 102-160, Pj-1364, Pj-1484, Pj-1229, Pj- | |
| | | | | | 1231, Pj-1233, Pj-1236, Pj-1241, Pj- | |
| | | | | | 1248, Pj-1255, Pj-1262, Pj-1283, Pj- | |
| | | | | | 1297, Pj-1298, Pj-1300, Pj-1322, Pj- | |
| | | | | | 1330, Pj-1369, Pj-1386, PBI-71 | |
| 100 | 100 | T | — | | Pj-102-59, Pj-102-77, Pj-102-93, Pj- | |
| | | | | | 102-160, Pj-1364, Pj-1484, Pj-1229, Pj- | |
| | | | | | 1231, Pj-1233, Pj-1236, Pj-1241, Pj- | |
| | | | | | 1248, Pj-1255, Pj-1262, Pj-1283, Pj- | |
| | | | | | 1297, Pj-1298, Pj-1300, Pj-1322, Pj- | |
| | | | | | 1330, Pj-1369, Pj-1386, PBI-71 | |
| 101 | 101 | T | — | | Pj-102-59, Pj-102-77, Pj-102-93, Pj- | |
| | | | | | 102-160, Pj-1364, Pj-1484, Pj-1229, Pj- | |
| | | | | | 1231, Pj-1233, Pj-1236, Pj-1241, Pj- | |
| | | | | | 1248, Pj-1255, Pj-1262, Pj-1283, Pj- | |
| | | | | | 1297, Pj-1298, Pj-1300, Pj-1322, Pj- | |
| | | | | | 1330, Pj-1369, Pj-1386, PBI-71 | |
| 102 | 102 | E | — | | Pj-102-59, Pj-102-77, Pj-102-93, Pj- | |
| | | | | | 102-160, Pj-1364, Pj-1484, Pj-1229, Pj- | |
| | | | | | 1231, Pj-1233, Pj-1236, Pj-1241, Pj- | |
| | | | | | 1248, Pj-1255, Pj-1262, Pj-1283, Pj- | |
| | | | | | 1297, Pj-1298, Pj-1300, Pj-1322, Pj- | |
| | | | | | 1330, Pj-1369, Pj-1386, PBI-71 | |
| 103 | 103 | T | — | | Pj-102-59, Pj-102-77, Pj-102-93, Pj- | |
| | | | | | 102-160, Pj-1364, Pj-1484, Pj-1229, Pj- | |
| | | | | | 1231, Pj-1233, Pj-1236, Pj-1241, Pj- | |
| | | | | | 1248, Pj-1255, Pj-1262, Pj-1283, Pj- | |
| | | | | | 1297, Pj-1298, Pj-1300, Pj-1322, Pj- | |
| | | | | | 1330, Pj-1369, Pj-1386, PBI-71 | |
| 104 | 104 | A | — | | Pj-102-59, Pj-102-77, Pj-102-93, Pj- | |
| | | | | | 102-160, Pj-1364, Pj-1484, Pj-1229, Pj- | |
| | | | | | 1231, Pj-1233, Pj-1241, Pj-1248, Pj- | |
| | | | | | 1255, Pj-1283, Pj-1297, Pj-1298, Pj- | |
| | | | | | 1322, Pj-1330, Pj-1369, Pj-1386, PBI- | |
| | | | | | 71 | |
| 110 | 110 | A | T | | Pj-1279 | |
| 116 | 116 | A | V | | Pj-1229 | |
| 117 | 117 | S | G | | Pj-1364, Pj-1484, Pj-1229, Pj-1230, Pj- | |
| | | | | | 1233, Pj-1234, Pj-1236, Pj-1262, Pj- | |
| | | | | | 1300, PBI-71 | |
| 119 | 119 | V | A | | Pj-102-160, Pj-1255 | |
| 120 | 120 | V | I | | Pj-1241 | |
| 126 | 126 | A | V | | Pj-1279 | |
| 153 | 153 | A | E | | Pj-102-94, Pj-102-148, Pj-102-163, Pj- | |
| | | | | | 102-468, Pj-1229, Pj-1232, Pj-1237, Pj- | |
| | | | | | 1242, Pj-1347 | |
| 164 | 164 | P | S | | Pj-1279 | |
| 194 | 194 | A | V | | Pj-102-148 | |
| 225 | 225 | K | — | | Pj-102-160 | |
| 226 | 226 | V | — | | Pj-102-160 | |
| 227 | 227 | Q | — | | Pj-102-160 | |
| 228 | 228 | A | — | T | Pj-102-160 | Pj-102-148 |
| 229 | 229 | L | — | | Pj-102-160 | |
| 230 | 230 | S | — | | Pj-102-160 | |
| 231 | 231 | N | — | | Pj-102-160 | |
| 232 | 232 | T | — | | Pj-102-160 | |
| 233 | 233 | N | — | | Pj-102-160 | |
| 234 | 234 | S | — | | Pj-102-160 | |
| 235 | 235 | K | — | | Pj-102-160 | |
| 236 | 236 | A | — | | Pj-102-160 | |
| 324 | 324 | A | V | | Pj-1364 | |
| 348 | 348 | E | R | | Pj-1490 | |
| 359 | 359 | E | A | | Pj-102-77 | |
| 405 | 405 | A | V | | Pj-1369 | |
| 603 | 603 | D | V | | Pj-102-160, Pj-1229, Pj-1255 | |
| 641 | 641 | P | S | | Pj-102-62, Pj-102-70, Pj-102-160, Pj- | |
| | | | | | 1229, Pj-1255 | |
| 666 | 666 | D | A | | Pj-102-59, Pj-1364, Pj-1484, Pj-1231, | |
| | | | | | Pj-1233, Pj-1234, Pj-1279, Pj-1283, Pj- | |
| | | | | | 1298, Pj-1386 | |
| 685 | 685 | E | K | | Pj-102-98, Pj-102-386, Pj-1250 | |
| 692 | 692 | Q | R | | Pj-1236, Pj-1262 | |
| 694 | 694 | N | H | | Pj-102-59 | |
| 750 | 750 | S | N | | Pj-1241, Pj-1297, Pj-1369 | |
| 800 | 836 | D | E | | Pj-1230, Pj-1236, Pj-1262, Pj-1300 | |
| 806 | 842 | K | Q | | Pj-1230, Pj-1236, Pj-1262, Pj-1300 | |
| 812 | 848 | K | R | | Pj-1230, Pj-1236, Pj-1262, Pj-1300 | |
| 826 | 862 | D | G | | Pj-1230, Pj-1236, Pj-1262, Pj-1300 | |
| 831 | 867 | K | D | | Pj-1230, Pj-1236, Pj-1262, Pj-1300 | |
| 869 | 905 | P | S | | Pj-102-468, Pj-1242, Pj-1291, Pj-1347 | |
| 907 | 943 | E | K | | Pj-1300 | |
| 924 | 960 | I | V | | Pj-1364, Pj-1484, Pj-1233, Pj-1234, Pj- | |
| | | | | | 1241, Pj-1297 | |
| 974 | 1010 | A | V | | Pj-1241 | |
| 989 | 1025 | A | S | | Pj-102-160, Pj-1229, Pj-1255, Pj-1369 | |
| 992 | 1028 | P | Q | | Pj-102-62, Pj-102-70 | |
| 1006 | 1042 | Q | P | | Pj-1364, Pj-1484, Pj-1234 | |
| 1007 | 1043 | T | I | | Pj-102-148, PBI-71 | |
| 1054 | 1090 | P | Q | | Pj-1233 | |
| 1142 | 1178 | Q | K | | Pj-102-160, Pj-1255 | |
| 1158 | 1194 | E | K | | Pj-1322 | |
| 1162 | 1198 | D | N | | Pj-102-148, Pj-1322 | |
| 1168 | 1204 | S | N | | Pj-102-59, Pj-1231, Pj-1283, Pj-1298, | |
| | | | | | Pj-1386 | |
| 1170 | 1206 | D | N | | Pj-102-62, Pj-102-70 | |
| 1175 | 1211 | R | C | | Pj-102-148 | |
| 1205 | 1241 | T | I | | Pj-1322 | |
| 1213 | 1249 | H | R | | Pj-102-59, Pj-102-62, Pj-102-70, Pj- | |
| | | | | | 102-77, Pj-102-93, Pj-102-94, Pj-102- | |
| | | | | | 148, Pj-102-163, Pj-102-228, Pj-102- | |
| | | | | | 468, Pj-1344, Pj-1364, Pj-1484, Pj- | |
| | | | | | 1490, Pj-1230, Pj-1231, Pj-1232, Pj- | |
| | | | | | 1234, Pj-1236, Pj-1237, Pj-1241, Pj- | |
| | | | | | 1242, Pj-1262, Pj-1283, Pj-1291, Pj- | |
| | | | | | 1297, Pj-1298, Pj-1300, Pj-1322, Pj- | |
| | | | | | 1347, Pj-1386 | |
| 1219 | 1255 | V | F | | Pj-102-62, Pj-102-70, Pj-1230 | |
| 1220 | 1256 | S | N | | Pj-102-59, Pj-102-62, Pj-102-70, Pj- | |
| | | | | | 102-77, Pj-102-93, Pj-102-94, Pj-102- | |
| | | | | | 148, Pj-102-163, Pj-102-228, Pj-102- | |
| | | | | | 468, Pj-1344, Pj-1364, Pj-1484, Pj- | |
| | | | | | 1490, Pj-1230, Pj-1231, Pj-1232, Pj- | |
| | | | | | 1233, Pj-1234, Pj-1236, Pj-1237, Pj- | |
| | | | | | 1241, Pj-1242, Pj-1262, Pj-1283, Pj- | |
| | | | | | 1291, Pj-1297, Pj-1298, Pj-1300, Pj- | |
| | | | | | 1322, Pj-1347, Pj-1386 | |
| 1257 | 1293 | S | P | | Pj-102-59, Pj-102-62, Pj-102-70, Pj- | |
| | | | | | 102-77, Pj-102-93, Pj-102-94, Pj-102- | |
| | | | | | 148, Pj-102-160, Pj-102-163, Pj-102- | |
| | | | | | 228, Pj-102-468, Pj-1344, Pj-1364, Pj- | |
| | | | | | 1484, Pj-1490, Pj-1230, Pj-1231, Pj- | |
| | | | | | 1232, Pj-1233, Pj-1234, Pj-1236, Pj- | |
| | | | | | 1237, Pj-1241, Pj-1242, Pj-1255, Pj- | |
| | | | | | 1262, Pj-1279, Pj-1283, Pj-1291, Pj- | |
| | | | | | 1297, Pj-1298, Pj-1300, Pj-1322, Pj- | |
| | | | | | 1347, Pj-1386 | |
| 1261 | 1297 | E | A | | Pj-1347 | |
| 1262 | 1298 | A | V | | Pj-1241 | |
| 1277 | 1313 | H | R | | Pj-1230 | |
| 1279 | 1315 | T | I | | Pj-102-148, Pj-1279, Pj-1322, Pj-1347, | |
| | | | | | PBI-71 | |
| 1291 | 1327 | K | E | | Pj-1369 | |
| 1306 | 1342 | T | K | | Pj-102-62, Pj-102-70, Pj-102-94, Pj- | |
| | | | | | 102-98, Pj-102-148, Pj-102-160, Pj-102- | |
| | | | | | 161, Pj-102-163, Pj-102-386, Pj-1344, | |
| | | | | | Pj-1490, Pj-1230, Pj-1236, Pj-1237, Pj- | |
| | | | | | 1241, Pj-1250, Pj-1255, Pj-1262, Pj- | |
| | | | | | 1279, Pj-1284, Pj-1297, Pj-1300, Pj- | |
| | | | | | 1322, Pj-1347, PBI-71 | |
| 1319 | 1355 | V | A | | Pj-102-59, Pj-102-77, Pj-102-468, Pj- | |
| | | | | | 1364, Pj-1484, Pj-1231, Pj-1232, Pj- | |
| | | | | | 1233, Pj-1234, Pj-1242, Pj-1283, Pj- | |
| | | | | | 1291, Pj-1298, Pj-1386 | |
| 1324 | 1360 | A | D | | Pj-1322, Pj-1347 | |
| 1325 | 1361 | A | T | | Pj-1297 | |
| 1344 | 1380 | A | V | | Pj-1241, Pj-1322, Pj-1347 | |
| 1357 | 1393 | T | A | | Pj-102-59, Pj-102-62, Pj-102-70, Pj- | |
| | | | | | 102-77, Pj-102-94, Pj-102-98, Pj-102- | |
| | | | | | 148, Pj-102-161, Pj-102-163, Pj-102- | |
| | | | | | 386, Pj-102-468, Pj-1344, Pj-1490, Pj- | |
| | | | | | 1230, Pj-1231, Pj-1232, Pj-1233, Pj- | |
| | | | | | 1236, Pj-1237, Pj-1241, Pj-1242, Pj- | |
| | | | | | 1250, Pj-1262, Pj-1279, Pj-1283, Pj- | |
| | | | | | 1284, Pj-1291, Pj-1297, Pj-1298, Pj- | |
| | | | | | 1300, Pj-1322, Pj-1347, Pj-1386, PBI- | |
| | | | | | 71 | |
| 1359 | 1395 | A | T | | Pj-102-93, Pj-102-228 | |
| 1365 | 1401 | D | Y | | Pj-1232 | |
| 1375 | 1411 | P | S | | Pj-102-59, Pj-102-77, Pj-102-94, Pj- | |
| | | | | | 102-163, Pj-102-468, Pj-1231, Pj-1232, | |
| | | | | | Pj-1237, Pj-1242, Pj-1283, Pj-1291, Pj- | |
| | | | | | 1298, Pj-1386 | |
| 1395 | 1431 | T | S | | Pj-102-163, Pj-102-174 | |
| 1428 | 1464 | L | W | | Pj-1236 | |
| 1436 | 1472 | D | A | | Pj-1230 | |
| 1464 | 1500 | E | G | | Pj-102-93, Pj-1291 | |
| 1469 | 1505 | A | T | | Pj-102-62, Pj-102-70, Pj-102-161, Pj- | |
| | | | | | 1232 | |
| 1477 | 1513 | V | I | | Pj-1233 | |
| 1482 | 1518 | P | S | | Pj-1232 | |
| 1507 | 1543 | T | K | | Pj-102-59, Pj-102-62, Pj-102-70, Pj- | |
| | | | | | 102-77, Pj-102-93, Pj-102-98, Pj-102- | |
| | | | | | 161, Pj-102-386, Pj-1344, Pj-1364, Pj- | |
| | | | | | 1484, Pj-1490, Pj-1230, Pj-1231, Pj- | |
| | | | | | 1233, Pj-1234, Pj-1241, Pj-1250, Pj- | |
| | | | | | 1283, Pj-1284, Pj-1291, Pj-1297, Pj- | |
| | | | | | 1298, Pj-1300, Pj-1322, Pj-1386, PBI- | |
| | | | | | 71 | |
| 1517 | 1553 | T | A | | Pj-102-59, Pj-102-62, Pj-102-70, Pj- | |
| | | | | | 102-77, Pj-102-93, Pj-102-94, Pj-102- | |
| | | | | | 98, Pj-102-148, Pj-102-160, Pj-102-161, | |
| | | | | | Pj-102-163, Pj-102-228, Pj-102-386, Pj- | |
| | | | | | 102-468, Pj-1344, Pj-1364, Pj-1484, Pj- | |
| | | | | | 1490, Pj-1229, Pj-1230, Pj-1231, Pj- | |
| | | | | | 1232, Pj-1233, Pj-1234, Pj-1236, Pj- | |
| | | | | | 1237, Pj-1241, Pj-1242, Pj-1250, Pj- | |
| | | | | | 1255, Pj-1262, Pj-1279, Pj-1283, Pj- | |
| | | | | | 1284, Pj-1291, Pj-1297, Pj-1298, Pj- | |
| | | | | | 1300, Pj-1322, Pj-1347, Pj-1386, PBI- | |
| | | | | | 71 | |
| 1539 | 1575 | E | D | | Pj-1230 | |
| 1543 | 1579 | T | A | | Pj-102-59, Pj-102-62, Pj-102-70, Pj- | |
| | | | | | 102-77, Pj-102-94, Pj-102-98, Pj-102- | |
| | | | | | 148, Pj-102-160, Pj-102-161, Pj-102- | |
| | | | | | 163, Pj-102-386, Pj-102-468, Pj-1344, | |
| | | | | | Pj-1364, Pj-1484, Pj-1490, Pj-1228, Pj- | |
| | | | | | 1229, Pj-1230, Pj-1231, Pj-1232, Pj- | |
| | | | | | 1233, Pj-1234, Pj-1236, Pj-1237, Pj- | |
| | | | | | 1242, Pj-1250, Pj-1255, Pj-1262, Pj- | |
| | | | | | 1279, Pj-1283, Pj-1284, Pj-1298, Pj- | |
| | | | | | 1322, Pj-1347, Pj-1386, PBI-71 | |
| 1570 | 1606 | N | K | | Pj-1279, Pj-1291 | |
| 1601 | 1637 | V | I | | PBI-71 | |
| 1604 | 1640 | T | I | | Pj-102-148 | |
| 1634 | 1670 | A | T | | Pj-1279 | |
| 1638 | 1674 | G | V | | Pj-1344, Pj-1490 | |
| 1650 | 1686 | T | I | | Pj-1364, Pj-1484, Pj-1234 | |
| 1658 | 1694 | K | E | | Pj-1364, Pj-1484, Pj-1234 | |

^{1,2}observed amino acid at respective position in any of the sequenced genes of the respective S. pneumoniae strains.
—, amino acid deletion.
Strain Pj-1298 shows an insertion of 36 amino acids (GVRSEAATTIYLPKVSRSASAQGTTQELKVVAVGKN) after position 788 relative to the Reference strain TIGR4_Tettelin strain.

### Sequence Analyses of SP0609

[0251] Sequences were obtained from 54 pneumococcal strains. The level of amino acid sequence identity ranged from 90.3% to 100% as compared to the sequence of SP0609 from S. pneumoniae TIGR4_Tettelin. Table 5 lists all 42 amino acid positions which showed a distinct amino acid as compared to SP0609 from the Reference strain S. pneumoniae TIGR4_Tettelin.

TABLE 5
Gene conservation of SP0609.

| Reference | Alignment | Amino acid in | | | Strains with | Strains with |
|---|---|---|---|---|---|---|
| position | position | Reference | AA change¹ | AA change² | respective change¹ | respective change² |
| n.p. | 1 | n.p. | M | | All 54 strains | |
| n.p. | 2 | n.p. | K | | All 54 strains | |
| n.p. | 3 | n.p. | K | | All 54 strains | |
| n.p. | 4 | n.p. | K | | All 54 strains | |
| n.p. | 5 | n.p. | F | | All 54 strains | |
| n.p. | 6 | n.p. | F | | All 54 strains | |
| n.p. | 7 | n.p. | L | | All 54 strains | |
| n.p. | 8 | n.p. | S | | All 54 strains | |
| n.p. | 9 | n.p. | A | | All 54 strains | |
| n.p. | 10 | n.p. | L | | All 54 strains | |
| 5 | 15 | F | L | | I-33_Andersson | |
| 6 | 16 | G | S | | Pj-1229, Pj-1291_Andersson | |
| 8 | 18 | A | T | V | Pj-1291_Andersson | Pj-102-77, Pj-1230, |
| | | | | | | Pj-1232, Pj-1284, |
| | | | | | | Pj-1369 |
| 16 | 26 | D | N | | Pj-102-77, Pj-1230, Pj-1232, Pj-1284, Pj- | |
| | | | | | 1369 | |
| 18 | 28 | S | N | | Pj-1279 | |
| 19 | 29 | I | V | | I-33_Andersson, Pj-1291_Andersson | |
| 31 | 41 | G | D | | Pj-1322 | |
| 48 | 58 | T | S | | Pj-1291_Andersson | |
| 59 | 69 | M | I | | Pj-102-93, Pj-102-228 | |
| 60 | 70 | V | I | | Pj-1291_Andersson | |
| 68 | 78 | I | V | | I-33_Andersson, Pj-1291_Andersson | |
| 69 | 79 | R | H | | Pj-102-77, Pj-1230 | |
| 79 | 89 | G | A | | Pj-1250 | |
| 84 | 94 | N | H | | Pj-1322 | |
| 87 | 97 | V | G | | Pj-1236, Pj-1248, Pj-1262, Pj-1330 | |
| 124 | 134 | K | N | | Pj-1291_Andersson | |
| 127 | 137 | K | S | | I-33_Andersson, Pj-1291_Andersson | |
| 133 | 143 | G | S | | Pj-102-94, Pj-102-163, Pj-1237, Pj-1297, Pj- | |
| | | | | | 1345 | |
| 141 | 151 | G | S | | Pj-102-148, Pj-1297 | |
| 146 | 156 | R | C | | Pj-102-94, Pj-102-163, Pj-1233, Pj-1237, Pj- | |
| | | | | | 1297, Pj-1345 | |
| 156 | 166 | G | D | | Pj-1242 | |
| 158 | 168 | K | T | | Pj-102-93, Pj-102-94, Pj-102-148, Pj-102- | |
| | | | | | 163, Pj-102-228, Pj-1232, Pj-1233, Pj-1237, | |
| | | | | | Pj-1284, Pj-1297, Pj-1322, Pj-1345, Pj- | |
| | | | | | 1369, PBI-71, Pj-1291_Andersson | |
| 181 | 191 | T | A | | Pj-102-59, Pj-102-77, Pj-102-93, Pj-102-94, | |
| | | | | | Pj-102-98, Pj-102-148, Pj-102-163, Pj-102- | |
| | | | | | 228, Pj-102-386, Pj-1344, Pj-1490, Pj-1228, | |
| | | | | | Pj-1230, Pj-1231, Pj-1232, Pj-1233, Pj- | |
| | | | | | 1236, Pj-1237, Pj-1241, Pj-1242, Pj-1248, | |
| | | | | | Pj-1250, Pj-1262, Pj-1283, Pj-1284, Pj- | |
| | | | | | 1297, Pj-1298, Pj-1300, Pj-1322, Pj-1330, | |
| | | | | | Pj-1345, Pj-1369, Pj-1386, PBI-71, I- | |
| | | | | | 33_Andersson, Pj-1291_Andersson | |
| 193 | 203 | T | I | | I-33_Andersson, Pj-1291_Andersson | |
| 194 | 204 | S | N | | Pj-102-59, Pj-102-98, Pj-102-386, Pj-1231, | |
| | | | | | Pj-1241, Pj-1242, Pj-1250, Pj-1283, Pj- | |
| | | | | | 1298, Pj-1300, Pj-1386, PBI-71 | |
| 198 | 208 | A | E | V | Pj-102-77, Pj-102-93, Pj-102-94, Pj-102- | I-33_Andersson |
| | | | | | 163, Pj-102-228, Pj-1344, Pj-1490, Pj-1228, | |
| | | | | | Pj-1230, Pj-1232, Pj-1233, Pj-1237, Pj- | |
| | | | | | 1284, Pj-1297, Pj-1322, Pj-1345, Pj-1369, | |
| | | | | | Pj-1291_Andersson | |
| 220 | 230 | L | F | | Pj-1236, Pj-1248, Pj-1262, Pj-1330 | |
| 222 | 232 | D | N | | Pj-1322 | |
| 224 | 234 | L | F | | Pj-1291_Andersson | |
| 226 | 236 | N | Q | T | Pj-1291_Andersson | Pj-102-93, Pj-102- |
| | | | | | | 160, Pj-102-161, |
| | | | | | | Pj-102-228, Pj- |
| | | | | | | 1255 |
| 242 | 252 | D | G | | Pj-1322 | |

^{1,2}observed amino acid at respective position in any of the sequenced genes of the respective S. pneumoniae strains.
n.p., corresponding amino acids not present.

### Sequence Analyses of SP0749

[0252] Sequences were obtained from 53 pneumococcal strains. The level of amino acid sequence identity ranged from 99% to 100% as compared to the sequence of SP0749 from S. pneumoniae TIGR4_Tettelin. Table 6 lists all 13 amino acid positions which showed a distinct amino acid as compared to SP0749 from the Reference strain S. pneumoniae TIGR4_Tettelin.

TABLE 6
Gene conservation of SP0749.

| Reference | Alignment | Amino acid in | AA | Strains with |
|---|---|---|---|---|
| position | position | Reference | change ¹ | respective change ¹ |
| 22 | 22 | G | V | Pj-1344, Pj-1490, Pj-1228 |
| 73 | 73 | A | G | Pj-1231, Pj-1298 |
| 85 | 85 | V | I | Pj-102-62, Pj-102-70, Pj-102-77, Pj-102-93, |
| | | | | Pj-102-161, Pj-1230, Pj-1233, Pj-1279 |
| 123 | 123 | A | V | Pj-1279 |
| 126 | 126 | A | S | Pj-102-62, Pj-102-70 |
| 224 | 224 | K | N | Pj-1344, Pj-1490, Pj-1228 |
| 228 | 228 | K | R | Pj-102-93, Pj-102-161, Pj-1279 |
| 252 | 252 | M | K | Pj-1279 |
| 275 | 275 | A | V | Pj-102-62, Pj-102-70 |
| 341 | 343 | N | D | Pj-102-62, Pj-102-70, Pj-102-77, Pj-102-98, |
| | | | | Pj-102-148, Pj-102-160, Pj-102-386, Pj-1344, |
| | | | | Pj-1490, Pj-1228, Pj-1230, Pj-1232, Pj-1233, |
| | | | | Pj-1236, Pj-1250, Pj-1255, Pj-1262, Pj-1284, |
| | | | | Pj-1291, Pj-1297, Pj-1300, Pj-1330, Pj-1345, |
| | | | | Pj-1347, Pj-1369, PBI-71 |
| 342 | 344 | N | S | Pj-1300 |
| 362 | 364 | H | Y | Pj-1283 |
| 386 | 388 | P | S | Pj-1322 |

¹ observed amino acid at respective position in any of the sequenced genes of the respective S. pneumoniae strains. Strain Pj-1229 shows an insertion of 2 amino acids (AK) after position 294 relative to the Reference strain TIGR4_Tettelin.

### Sequence Analyses of SP2027

[0253] Sequences were obtained from 53 pneumococcal strains. The level of amino acid sequence identity ranged from 97.8% to 100% as compared to the sequence of SP2027 from S. pneumoniae TIGR4_Tettelin. Table 7 lists all 7 amino acid positions which showed a distinct amino acid as compared to SP2027 from the Reference strain S. pneumoniae TIGR4_Tettelin.

TABLE 7
Gene conservation of SP2027.

| Reference | Alignment | Amino acid in | AA | Strains with |
|---|---|---|---|---|
| position | position | Reference | change ¹ | respective change ¹ |
| 1 | 1 | V | M | I-33_Andersson |
| 4 | 4 | L | P | Pj-1231, Pj-1298, Pj-1322 |
| 5 | 5 | T | K | I-33_Andersson |
| 18 | 18 | P | Q | I-33_Andersson |
| 22 | 22 | L | I | Pj-102-161, Pj-1364, Pj-1484, Pj-1234, |
| | | | | Pj-1255, Pj-1284, Pj-1300 |
| 24 | 24 | A | T | Pj-1364, Pj-1484, Pj-1234, Pj-1284 |
| 86 | 86 | A | S | Pj-102-148 |

¹ observed amino acid at respective position in any of the sequenced genes of the respective S. pneumoniae strains.

### Sequence Analyses of SP2194

[0254] Sequences were obtained from 18 pneumococcal strains. The level of amino acid sequence identity ranged from 99.3% to 100% as compared to the sequence of SP2194 from S. pneumoniae TIGR4_Tettelin. Table 8 lists all 17 amino acid positions which showed a distinct amino acid as compared to SP2194 from the Reference strain S. pneumoniae TIGR4_Tettelin.

TABLE 8
Gene conservation of SP2194.

| Reference | Alignment | Amino acid in | AA | Strains with |
|---|---|---|---|---|
| position | position | Reference | change ¹ | respective change ¹ |
| 4 | 4 | S | L | Pj-1234 |
| 54 | 54 | M | L | Pj-1237 |
| 86 | 86 | V | I | Pj-1237 |
| 91 | 91 | A | S | Pj-1237 |
| 109 | 109 | L | F | Pj-1250, Pj-1284 |
| 116 | 116 | S | G | Pj-102-228, Pj-1364, Pj-1230, Pj-1231, Pj-1234, |
| | | | | Pj-1236, Pj-1237, Pj-1241, Pj-1250, Pj-1262, |
| | | | | Pj-1283, Pj-1284, Pj-1291 |
| 257 | 257 | P | S | Pj-1241 |
| 262 | 262 | K | N | Pj-1250 |
| 433 | 433 | A | S | Pj-102-228, Pj-1230, Pj-1236, Pj-1262 |
| 435 | 435 | H | Y | Pj-102-93, Pj-1250 |
| 565 | 565 | V | A | Pj-102-228 |
| 714 | 714 | V | A | Pj-1232 |
| 739 | 739 | T | A | Pj-102-70, Pj-102-93, Pj-102-161, Pj-102-228, |
| | | | | Pj-1364, Pj-1484, Pj-1230, Pj-1231, Pj-1232, |
| | | | | Pj-1234, Pj-1236, Pj-1237, Pj-1241, Pj-1250, |
| | | | | Pj-1262, Pj-1283, Pj-1284, Pj-1291 |
| 742 | 742 | G | C | Pj-1237 |
| 759 | 759 | G | V | Pj-102-228 |
| 762 | 762 | P | L | Pj-1230 |
| 794 | 794 | S | N | Pj-102-161, Pj-1364, Pj-1484, Pj-1232, Pj-1234 |

¹ observed amino acid at respective position in any of the sequenced genes of the respective S. pneumoniae strains.

TABLE 9
Sequence conservation of S. pneumoniae genes in various strains.

| Strain name | SP0498 | SP0609 | SP0749 | SP2027 | SP2194 |
|---|---|---|---|---|---|
| Pj-102-59 | Seq ID 45 | Seq ID 94 | IDENT. | IDENT. | n.d. |
| Pj-102-62 | Seq ID 46 | IDENT. | Seq ID 137 | IDENT. | n.d. |
| Pj-102-70 | Seq ID 47 | IDENT. | Seq ID 138 | IDENT. | Seq ID 187 |
| Pj-102-77 | Seq ID 48 | Seq ID 95 | Seq ID 139 | IDENT. | n.d. |
| Pj-102-93 | Seq ID 49 | Seq ID 96 | Seq ID 140 | IDENT. | Seq ID 188 |
| Pj-102-94 | Seq ID 50 | Seq ID 97 | IDENT. | IDENT. | n.d. |
| Pj-102-98 | Seq ID 51 | Seq ID 98 | Seq ID 141 | IDENT. | n.d. |
| Pj-102-113 | IDENT. | IDENT. | IDENT. | IDENT. | n.d. |
| Pj-102-148 | Seq ID 52 | Seq ID 99 | Seq ID 142 | Seq ID 173 | n.d. |
| Pj-102-160 | Seq ID 53 | Seq ID 100 | Seq ID 143 | IDENT. | n.d. |
| Pj-102-161 | Seq ID 54 | Seq ID 101 | Seq ID 144 | Seq ID 174 | Seq ID 189 |
| Pj-102-163 | Seq ID 55 | Seq ID 102 | IDENT. | IDENT. | n.d. |
| Pj-102-174 | Seq ID 56 | IDENT. | IDENT. | IDENT. | n.d. |
| Pj-102-228 | Seq ID 57 | Seq ID 103 | IDENT. | IDENT. | Seq ID 190 |
| Pj-102-386 | Seq ID 58 | Seq ID 104 | Seq ID 145 | IDENT. | n.d. |
| Pj-102-468 | Seq ID 59 | IDENT. | IDENT. | IDENT. | n.d. |
| Pj-1344 | Seq ID 60 | Seq ID 105 | Seq ID 146 | IDENT. | n.d. |
| Pj-1364 | Seq ID 61 | IDENT. | IDENT. | Seq ID 175 | Seq ID 191 |
| Pj-1484 | Seq ID 62 | IDENT. | IDENT. | Seq ID 176 | Seq ID 192 |
| Pj-1490 | Seq ID 63 | Seq ID 106 | Seq ID 147 | IDENT. | n.d. |
| Pj-1228 | Seq ID 64 | Seq ID 107 | Seq ID 148 | IDENT. | n.d. |
| Pj-1229 | Seq ID 65 | Seq ID 108 | IDENT. | IDENT. | n.d. |
| Pj-1230 | Seq ID 66 | Seq ID 109 | Seq ID 149 | IDENT. | Seq ID 193 |
| Pj-1231 | Seq ID 67 | Seq ID 110 | Seq ID 150 | Seq ID 177 | Seq ID 194 |
| Pj-1232 | Seq ID 68 | Seq ID 111 | Seq ID 151 | IDENT. | Seq ID 195 |
| Pj-1233 | Seq ID 69 | Seq ID 112 | Seq ID 152 | IDENT. | n.d. |
| Pj-1234 | Seq ID 70 | IDENT. | IDENT. | Seq ID 178 | Seq ID 196 |
| Pj-1236 | Seq ID 71 | Seq ID 113 | Seq ID 153 | IDENT. | Seq ID 197 |
| Pj-1237 | Seq ID 72 | Seq ID 114 | IDENT. | IDENT. | Seq ID 198 |
| Pj-1241 | Seq ID 73 | Seq ID 115 | IDENT. | IDENT. | Seq ID 199 |
| Pj-1242 | Seq ID 74 | Seq ID 116 | IDENT. | IDENT. | n.d. |
| Pj-1244 | IDENT. | IDENT. | IDENT. | IDENT. | n.d. |
| Pj-1248 | Seq ID 75 | Seq ID 117 | IDENT. | IDENT. | n.d. |
| Pj-1250 | Seq ID 76 | Seq ID 118 | Seq ID 154 | IDENT. | Seq ID 200 |
| Pj-1255 | Seq ID 77 | Seq ID 119 | Seq ID 155 | Seq ID 179 | n.d. |
| Pj-1262 | Seq ID 78 | Seq ID 120 | Seq ID 156 | IDENT. | Seq ID 201 |
| Pj-1279 | Seq ID 79 | Seq ID 121 | Seq ID 157 | IDENT. | n.d. |
| Pj-1283 | Seq ID 80 | Seq ID 122 | Seq ID 158 | IDENT. | Seq ID 202 |
| Pj-1284 | Seq ID 81 | Seq ID 123 | Seq ID 159 | Seq ID 180 | Seq ID 203 |
| Pj-1291 | Seq ID 82 | IDENT. | Seq ID 160 | IDENT. | Seq ID 204 |
| Pj-1297 | Seq ID 83 | Seq ID 124 | Seq ID 161 | IDENT. | n.d. |
| Pj-1298 | Seq ID 84 | Seq ID 125 | Seq ID 162 | Seq ID 181 | n.d. |
| Pj-1300 | Seq ID 85 | Seq ID 126 | Seq ID 163 | Seq ID 182 | n.d. |
| Pj-1322 | Seq ID 86 | Seq ID 127 | Seq ID 164 | Seq ID 183 | n.d. |
| Pj-1330 | Seq ID 87 | Seq ID 128 | Seq ID 165 | IDENT. | n.d. |
| Pj-1345 | n.d. | Seq ID 129 | Seq ID 166 | IDENT. | n.d. |
| Pj-1347 | Seq ID 88 | IDENT. | Seq ID 167 | IDENT. | n.d. |
| Pj-1369 | Seq ID 89 | Seq ID 130 | Seq ID 168 | IDENT. | n.d. |
| Pj-1386 | Seq ID 90 | Seq ID 131 | IDENT. | IDENT. | n.d. |
| PBI-71 | Seq ID 91 | Seq ID 132 | Seq ID 169 | IDENT. | n.d. |
| I-33_Andersson | n.d. | Seq ID 133 | n.d. | Seq ID 184 | n.d. |
| Pj-1291_Andersson | n.d. | Seq ID 134 | Seq ID 170 | n.d. | n.d. |
| TIGR4_DB | Seq ID 92 | Seq ID 135 | Seq ID 171 | Seq ID 185 | n.d. |
| TIGR4_IC | Seq ID 93 | Seq ID 136 | Seq ID 172 | Seq ID 186 | Seq ID 205 |

### Example 2

### Pneumococcal Antigens and Combinations Inducing Protective Immune Responses Against S. pneumoniae in Lethal Sepsis and Pneumonia Models

### Example 2.1

### Evaluation of Five Novel Pneumococcal Antigens for Protectivity in Lethal Sepsis and Pneumonia Models

### Experimental Procedures

[0255] Expression and purification of recombinant pneumococcal proteins: as described in Example 1.

### Animal Protection Studies

[0256] Animals: C3H/HeN and CD-1 female mice were used.

[0257] Active immunization: 50 μg of recombinant proteins were injected subcutaneously, adjuvanted with Complete Freund adjuvant (CFA) or aluminum hydroxide (ALUM). Animals were boosted twice with the same amount of protein and adjuvant, (except for CFA where Incomplete Freund adjuvant (IFA) was used) at days 14 and 28. The published protective antigen PspA (SP0117), lysate or Prevnar was used as a positive control, while mice immunized with adjuvant only served as negative controls. Antibody titres were measured at day 35 by ELISA using the respective recombinant proteins.

[0258] Bacterial challenge: A frozen glycerol stock of S. pneumoniae serotype 6B strain Pj-1259, serotype 19F strain EF3030 or serotype 3 strain WU2 was prepared and used for all experiments. In order to determine the viable cell numbers present in the bacterial inoculum, cfus were determined via plating on blood agar plates. 1×10⁴-5×10⁷ cfu were applied intraperitoneally or intranasally as challenge into individual mice. For intranasal applications, mice were anesthetized before the treatment. Protection by immunization was measured for both, a sepsis and a pneumonia model. In the i.p. sepsis model (serotype 6B strain Pj-1259), survival rates were followed for 2 weeks post-challenge and survival was expressed in percentage of total number of animals (10 mice/group). For the pneumonia model (serotype 19F strain EF3030, serotype 3 strain WU2), lungs were removed at day 3 post challenge under sterile conditions, homogenized and cultures of lung homogenates were quantitatively plated on blood agar plates. Cfus per organ were determined for each individual mouse (5-10 mice/group).

### Results

[0259] In the present invention single antigens and combinations of different pneumococcal antigens were identified showing a high level of protection in a mouse sepsis/lethality as well as in a pneumonia model. For initial experiments, additional 19 antigens, selected by the original AIP screens and in vitro validations, were chosen to be evaluated in a sepsis model for their protectivity. Two experiments were performed, one where the proteins were adjuvanted with ALUM and in the other experiment the proteins were mixed with CFA/IFA to induce a maximal antibody titer. Five out of the 19 proteins tested in combination with ALUM showed at least partial protection in the sepsis model, namely SP0498, SP0609, SP0749, SP2027 and SP2194 (FIG. 1A). In the repetition experiment with CFA/IFA out of the 19 tested candidates three candidates which were also protective in the first experiment showed again some protection, SP0749, SP2027 and SP2194 (FIG. 1B).

[0260] The five single proteins were either combined with SP1732-3+SP2216-1 or with SP1732-3+SP1650 (PsaA). All five proteins which were included in the combination with SP1732-3 and SP2216-1 (FIG. 2) showed an increased protection level compared with the negative control. The same could be observed when the five candidate antigens were combined with SP1732-3 and PsaA (FIG. 3).

[0261] In parallel to the testing of antigen protectivity in the sepsis model, experiments were also performed in the pneumonia models. This could be particularly relevant for an elderly vaccine where pneumonia is the major cause of disease.

[0262] Immunization and challenge experiments using the WU2 pneumonia model showed that from the single proteins only SP0609, SP2027 (1-2 log reduction) had an effect on colonization at day 3 post challenge (FIG. 4A). The most effective was crude lysate from the homologous strain (4 logs reduction). The same proteins were also tested in the EF3030 pneumonia model. As already seen in earlier experiments, the variability within the experiment was much broader than for the WU2 model. Significant reduction of about 4 logs could be seen for SP2027 and SP2194. A minor reduction was seen for SP0609, PspA and Prevnar (between 1 and 2 logs reduction; FIG. 4B).

[0263] When testing the new candidates in combination with SP1732-3 and SP2216-1 in the WU2 pneumonia model (FIG. 5A), combinations including SP0749, SP2027 or SP2194 reduced the bacterial count in the lung by about two logs. A minor reduction could be additionally seen in combination with SP0498 and SP0609 (˜1 log reduction). In the EF3030 model (FIG. 5B) the best reduction (˜4 logs) was seen with the combination including SP2027 or with Prevnar. For the combination with SP2027, mice either had a high bacterial count in the lung or had it completely cleared by day 3. Combinations including SP0609, SP0749 and SP2194 showed a medium reduction in lung colonization at day 3 post challenge of ˜2 logs.

### Example 2.2

### Evaluation of Three Additional Pneumococcal Antigens for Protectivity in Lethal Sepsis and Pneumonia Models

### Experimental Procedures

[0264] Expression and purification of recombinant pneumococcal proteins: as described in Example 1.

### Animal Protection Studies

[0265] Animals: C3H/HeN, CBA/N and NMRI female mice were used.

[0266] Active immunization: 50 μg of recombinant proteins were injected subcutaneously, adjuvanted with Complete Freund's adjuvant (CFA), aluminum hydroxide or IC31®. Animals were boosted twice with the same amount of protein and adjuvant, (except for CFA where Incomplete Freund's adjuvant (IFA) was used) at days 14 and 28. The published protective antigen PspA (SP0117) was used as a positive control, while mice immunized with adjuvant only served as negative controls. Antibody titres were measured at day 35 by ELISA using the respective recombinant proteins, in order to confirm that the immunization had induced a proper immune response.

[0267] Bacterial challenge: A frozen glycerol stock of S. pneumoniae serotype 6B strain Pj-1259, strain EF3030 or strain TIGR4_DB was prepared and used for all experiments including these strains. For other S. pneumoniae strains (e.g. 6301) freshly grown bacteria were used. In order to determine the viable cell numbers present in the bacterial inoculum, cfus were determined via plating on blood agar plates. 10²-10⁸ cfu were applied intraperitoneally, intravenously or intranasally as challenge into individual mice. For intranasal applications, mice were anesthetized before the treatment. Protection by immunization was measured for both, a sepsis and pneumonia model. In the sepsis model, survival rates were followed for approximately 2 weeks post-challenge and survival was expressed in percentage of total number of animals (10 mice/group). For the pneumonia model, lungs were removed at day 3 post challenge under sterile conditions, homogenized and cultures of lung homogenates were quantitatively plated on blood agar plates. Cfus per organ were determined for each individual mouse (5-10 mice/group).

### Results

[0268] Combinations of different pneumococcal antigens were identified showing a larger level of protection in a mouse sepsis/lethality model than the individual proteins alone (FIG. 6). The best levels of protection were achieved by immunization with a combination of three recombinant proteins SP2216-1, SP1732-3 and PsaA, while lower levels of protection were observed with combinations of only two proteins (SP2216-1+SP1732-3 superior to SP2216-1+PsaA superior to SP1732-3+PsaA). PsaA alone did not show a significant level of protection, but in combination with the other two proteins increased the protection level significantly. No negative influence on the protection level could be observed for any of the proteins tested. The increase in protection levels was independent of the adjuvant used, since no difference in protection was seen by using either Aluminum hydroxide or IC31® adjuvant (Intercell AG, Vienna, Austria).

[0269] SP2216-1 and SP1732-3 were not only been shown to be protective against S. pneumoniae 6B (FIG. 6), but it could be also demonstrated that they provided protection against different serotypes of S. pneumoniae. Protection could be shown against sepsis for S. pneumoniae strain 6301 (serotype 1) after intranasal application, which represents the more physiological way of challenge in contrast to the intraperitoneal route. SP2216-1 demonstrated a significant level of protection against sepsis in this model, which was higher than the protection capacity of PspA, the positive control protein. SP1732-3 showed a significant level of protection comparable to PspA, and well above the negative control (FIG. 7).

[0270] CBA/N mice have a spontaneous mutation in the xid gene and therefore lack the ability to produce antibodies to polysaccharides and lack serum antibodies to the phosphocholine determinant of pneumococcal teichoic acid. Immunization with SP2216-1 and SP1732-3 provided protection against challenge with the S. pneumoniae TIGR4_DB strain (serotype 4) in CBA/N mice. The protective effect was therefore clearly due to antibodies directed against the immunized proteins, but not against the bacterial polysaccharide. Although it is well known that the TIGR4_DB strain is a highly virulent strain of S. pneumoniae, mice were partially protected after vaccination with both proteins. The protection levels were well above the negative control, although not as high as those for PspA (FIG. 8).

[0271] Significant protection was also observed in additional sepsis models with a variety of serotypes of S. pneumoniae after immunization with both proteins, SP2216-1 and SP1732-3 (data not shown).

[0272] Beside sepsis, pneumonia is a major cause of pneumococcal death in patients. Therefore, it is relevant to show that protection or reduction of bacterial colonization can be induced by the vaccine candidates SP1732-3 and SP2216-1. Here we demonstrate the protective effect of a pneumococcal antigen against pneumonia. Mice immunized with SP2216-1 showed a reduced level of colonization when lung homogenates were tested for colonization 6 days after challenge with S. pneumoniae strain EF3030 (serotype 19F) (FIG. 9). SP2216-1 vaccinated animals clearly promoted a reduced bacterial load (2 to 3 log reduced) in the lung.

### Example 2.3

### Further Evaluation of the Three Additional Pneumococcal Antigens for Protectivity

### Experimental Procedures

[0273] Expression and purification of recombinant pneumococcal proteins: as described in Example 1.

### Animal Protection Studies

[0274] Animals: C3H/HeN, CD-1 and NMRI female mice were used.

[0275] Active immunization: 50 μg of recombinant proteins were injected subcutaneously or intramuscularly, adjuvanted with aluminum hydroxide (ALUM). Animals were boosted twice with the same amount of protein and adjuvant at days 14 and 28. The published protective antigen PspA (SP0117), Prevnar or the respective lysate was used as a positive control, while mice immunized with adjuvant only served as negative controls. Antibody titres were measured at day 35 by ELISA using the respective recombinant proteins.

[0276] Bacterial challenge: A frozen glycerol stock of S. pneumoniae serotype 6B strain Pj-1259, strain WU2 (serotype 3) or strain EF3030 (serotype 19F) was prepared and used for all experiments including these strains. For other S. pneumoniae serotypes (e.g. S. pneumoniae 6301—serotype 1) freshly grown bacteria were used for all experiments. In order to determine the viable cell numbers present in the bacterial inoculum, cfus were determined via plating on blood agar plates. 10⁴-10⁸ cfu were applied intraperitoneally or intranasally, as challenge into individual mice. For intranasal applications, mice were anesthetized before the treatment. Protection by immunization was measured for both, a sepsis and pneumonia model. In the sepsis model, survival rates were followed for 2 weeks post-challenge and survival was expressed in percentage of total number of animals (10 mice/group). For the pneumonia model, lungs were removed at day 3 post challenge under sterile conditions, homogenized and cultures of lung homogenates were quantitatively plated on blood agar plates. Cfus per organ were determined for each individual mouse (10 mice/group).

### Results

[0277] Combinations of different pneumococcal antigens were identified showing a similar or larger level of protection in mouse pneumonia models than the individual proteins alone (FIG. 10). Upon immunization with ALUM, the highest reduction in colonization with WU2 (serotype 3) was achieved, besides the lysate control, by immunization with a combination of two or three recombinant proteins, SP2216-1, SP1732-3 (and SP1650 (PsaA)), while lower levels of protection were observed with the single proteins as well as with the second positive control, PspA (FIG. 10A). SP1650 (PsaA) alone did not show a significant level of protection, but had no negative influence on the protection using combinations including SP2216-1 and SP1732-3.

[0278] Immunization and challenge experiments using the EF3030 pneumonia model (serotype 19F) in combination with ALUM adjuvant showed that particularly SP1732-3, SP2216-1+SP1732-3, SP2216-1+SP1732-3+SP1650 as well as Prevnar lowered lung colonization by day 3 substantially (by 3 to 5 logs) (FIG. 10B). PspA had also a beneficial effect on the reduction of colonization (1 to 4 logs). SP1650 did not reduce lung colonization at all. In combination with SP1732-3 and SP2216-1, SP1650 in general did not change the outcome substantially.

[0279] So far, all experiments have been performed using the subcutaneous immunization route. To define whether that is the most efficient route in mice, experiments were performed to compare the subcutaneous versus the intramuscular route in the 6B sepsis/lethality model. Combinations including all three proteins (SP2216-1, SP1732-3 and SP1650) were compared to the combination of SP2216-1 and SP1732-3. As seen in FIG. 11, no significant difference for the combination of all three proteins could be observed. For the combination with two proteins, the subcutaneous route showed slightly better protection.

[0280] Combinations of the proteins SP2216-1, SP1732-3 and SP1650 (PsaA) were not only shown to be protective against S. pneumoniae 6B, WU2 and EF3030 (FIG. 10, 11), but it could be also demonstrated that they provided protection against a further serotype of S. pneumoniae. Protection could be obtained against sepsis for S. pneumoniae strain 6301 (serotype 1) after intranasal application, which represents the more physiological way of challenge in contrast to the intraperitoneal route. The best protection was seen for the combination including all three proteins or the combination of only SP1732-3 and SP2216-1 (FIG. 12).

The application's sequence listing, which the Patent Office published only in electronic form, follows.

SEQUENCE LISTING (331 sequences)

SEQ ID NO: 1 - protein, 778 aa, Artificial Sequence
  Construct 1: SP0498 aa
GAGGESVNDGLMNTKDFDLYYKDADGEWKLAKEVRGNKAHVTDITLDKPITAQDWRLNVVTSDNGTPWKAIRIYNWKMYEKLDTESVNIPMAKAAARSLGNNKVQVGFADVPAGATITVYDNPNSQTPLATLKSEVGGDLASAPLDLTNQSGLLYYRTQLPGKEISNVLAVSVPKDDRRIKSVSLETGPKKTSYAEGEDLDLRGGVLRVQYEGGTEDELIRLTHAGVSVSGFDTHHKGEQNLTLQYLGQPVNANLSVTVTGQDEASPKTILGIEVSQEPKKDYLVGDSLDLSEGRFAVAYSNDTMEEHSFTDEGVEISGYDAQKTGRQTLTLHYQGHEVSFDVLVSPKAALNDEYLKQKLAEVEAAKNKVVYNFASSEVKEAFLKAIEAAEQVLKDHETSTQDQVNDRLNKLTEAHKALNGQEKFTEEKTELDRLTGEVQELLAAKPNHPSGSALAPLLEKNKALVEKVDLSPEELTTAKQSLKDLVALLKEDKPAVFSDSKTGVEVHFSNKEKTVIKGLKVERVQASAEEKKYFAGEDAHVFEIEGLDEKGQDVDLSYASIVKIPIEKDKKVKKVFFLPEGKEAVELAFEQTDSHVIFTAPHFTHYAFVYESAEKPQPAKPAPQNTVLPKPTYQPTSDQQKAPKLEVQEEKVAFHRQEHENTEMLVGEQRVIIQGRDGLLRHVFEVDENGQRRLRSTEVIQEAIPEIVEIGTKVKTVPAVVATQEKPAQNTAVKSEEASKQLPNTGTADANEALIAGLASLGLASLALTLRRKREDK

SEQ ID NO: 2 - protein, 254 aa, Artificial Sequence
  Construct 2: SP0609 aa
LISLFGLAAAKPVQADTSIADIQKRGELVVGVKQDVPNFGYKDPKTGTYPGIETDLAKMVADELKVKIRYVPVTAQTRGPLLDNEQVDMDIATFTITDERKKLYNFTSPYYTDASGFLVNKSAKIKKIEDLNGKTIGVAQGSITQRLITELGKKKGLKFKFVELGSYPELITSLHAHRIDTFSVDRSILSGYTSKRTALLDDSFKPSDYGIVTKKSNTELNDYLDNLVTKWSKDGSLQKLYDRYKLKPSSHTAD

SEQ ID NO: 3 - protein, 359 aa, Artificial Sequence
  Construct 3: SP0749 aa
AVNTAGNSVEEKTIKIGFNFEESGSLAAYGTAEQKGAQLAVDEINAAGGIDGKQIEVVDKDNKSETAEAASVTTNLVTQSKVSAVVGPATSGATAAAVANATKAGVPLISPSATQDGLTKGQDYLFIGTFQDSFQGKIISNYVSEKLNAKKVVLYTDNASDYAKGIAKSFRESYKGEIVADETFVAGDTDFQAALTKMKGKDFDAIVVPGYYNEAGKIVNQARGMGIDKPIVGGDGFNGEEFVQQATAEKASNIYFISGFSTTVEVSAKAKAFLDAYRAKYNEEPSTFAALAYDSVHLVANAAKGAKNSGEIKNNLAKTKDFEGVTGQTSFDADHNTVKTAYMMTMNNGKVEAAEVVKP

SEQ ID NO: 4 - protein, 135 aa, Artificial Sequence
  Construct 4: SP2027 aa
ENLTNFYEKYRVYLTRPRLELLAVVTIVFCAVLVFFLNIPGKGVLKLDNGTIVYDGSLVRGKMNGQGTITFQNGDQYTGGFNNGAFNGKGTFQSKEGWTYEGDFVNGQAEGKGKLTTEQEVVYEGTFKQGVFQQK

SEQ ID NO: 5 - protein, 809 aa, Artificial Sequence
  Construct 5: SP2194 aa
NYSKALNGCIESAYMVAGHFGARYLESWHLLIAMSNHSYSVAGATLNDYPYEMDRLEEVALELTETDYSQDETFTELPFSRRLQVLFDEAEYVASVVHAKVLGTEHVLYAILHDSNALATRILERAGFSYEDKKDQVKIAALRRNLEERAGWTREDLKALRQRHRTVADKQNSMANMMGMPQTPSGGLEDYTHDLTEQARSGKLEPVIGRDKEISRMIQILSRKTKNNPVLVGDAGVGKTALALGLAQRIASGDVPAEMAKMRVLELDLMNVVAGTRFRGDFEERMNNIIKDIEEDGQVILFIDELHTIMGSGSGIDSTLDAANILKPALARGTLRTVGATTQEEYQKHIEKDAALSRRFAKVTIEEPSVADSMTILQGLKATYEKHHRVQITDEAVETAVKMAHRYLTSRHLPDSAIDLLDEAAATVQNKAKHVKADDSDLSPADKALMDGKWKQAAQLIAKEEEVPVYKDLVTESDILTTLSRLSGIPVQKLTQTDAKKYLNLEAELHKRVIGQDQAVSSISRAIRRNQSGIRSHKRPIGSFMFLGPTGVGKTELAKALAEVLFDDESALIRFDMSEYMEKFAASRLNGAPPGYVGYEEGGELTEKVRNKPYSVLLFDEVEKAHPDIFNVLLQVLDDGVLTDSKGRKVDFSNTIIIMTSNLGATALRDDKTVGFGAKDIRFDQENMEKRMFEELKKAYRPEFINRIDEKVVFHSLSSDHMQEVVKIMVKPLVASLTEKGIDLKLQASALKLLANQGYDPEMGARPLRRTLQTEVEDKLAELLLKGDLVAGSTLKIGVKAGQLKFDIA

SEQ ID NO: 6 - protein, 251 aa, Artificial Sequence
  Construct 6: SP2216-1 aa
ETTDDKIAAQDNKISNLTAQQQEAQKQVDQIQEQVSAIQAEQSNLQAENDRLQAESKKLEGEITELSKNIVSRNQSLEKQARSAQTNGAVTSYINTIVNSKSITEAISRVAAMSEIVSANNKMLEQQKADKKAISEKQVANNDAINTVIANQQKLADDAQALTTKQAELKAAELSLAAEKATAEGEKASLLEQKAAAEAEARAAAVAEAAYKEKRASQQQSVLASANTNLTAQVQAVSESAAAPVRAKVRP

SEQ ID NO: 7 - protein, 315 aa, Artificial Sequence
  Construct 7: SP1732-3 aa
YLILLASLVLVAASLIWILSRTPATIAIPDVAGQTVAEAKATLKKANFEIGEEKTEASEKVEEGRIIRTDPGAGTGRKEGTKINLVVSSGKQSFQISNYVGRKSSDVIAELKEKKVPDNLIKIEEEESNESEAGTVLKQSLPEGTTYDLSKATQIVLTVAKKATTIQLGNYIGRNSTEVISELKQKKVPENLIKIEEEESSESEPGTIMKQSPGAGTTYDVSKPTQIVLTVAKKVTSVAMPSYIGSSLEFTKNNLIQIVGIKEANIEVVEVTTAPAGSVEGMVVEQSPRAGEKVDLNKTRVKISIYKPKTTSATP

SEQ ID NO: 8 - protein, 289 aa, Artificial Sequence
  Construct 8: SP1650 (PsaA) aa
ASGKKDTTSGQKLKVVATNSIIADITKNIAGDKIDLHSIVPIGQDPHEYEPLPEDVKKTSEADLIFYNGINLETGGNAWFTKLVENAKKTENKDYFAVSDGVDVIYLEGQNEKGKEDPHAWLNLENGIIFAKNIAKQLSAKDPNNKEFYEKNLKEYTDKLDKLDKESKDKFNKIPAEKKLIVTSEGAFKYFSKAYGVPSAYIWEINTEEEGTPEQIKTLVEKLRQTKVPSLFVESSVDDRPMKTVSQDTNIPIYAQIFTDSIAEQGKEGDSYYSMMKYNLDKIAEGLAK

SEQ ID NO: 9 - DNA, 2334 bp, Artificial Sequence
  Construct 1: SP0498 nt
ggagctggtggtgagtctgttaacgatggcttgatgaacactaaagactttgacctttattataaagatgcagatggtgagtggaagctagctaaggaagtccgtggtaacaaagcacacgtgacagatatcactcttgataaaccaatcactgctcaagactggcgcttgaatgttgtcacttctgacaatggaactccatggaaggctattcgtatctataactggaaaatgtatgaaaagcttgatactgagagtgtcaatattccgatggccaaggctgcagcccgttctctaggcaataacaaggtacaagttggctttgcagatgtaccggctggagcaactattaccgtttatgataatccaaattctcaaactccgctcgcaaccttgaagagcgaagttggaggagacctagcaagtgcaccattggatttgacaaatcaatctggtcttctttattatcgtacccagttgccaggcaaggaaattagtaatgtcctagcagtttccgttccaaaagatgacagaagaatcaagtcagtcagcctagaaacaggacctaagaaaacaagctacgccgaaggggaggatttggaccttagaggtggtgttcttcgagttcagtatgaaggaggaactgaggacgaactcattcgcctaactcacgcaggtgtatcagtatcaggttttgatacgcatcataagggagaacagaatcttactctccaatatttgggacaaccggtaaatgctaatttgtcagtgactgtcactggccaagacgaagcaagtccgaaaactattttgggaattgaagtaagtcaggaaccgaaaaaagattacctagttggtgatagcttagacttgtctgaaggacgctttgcagtggcttatagcaatgacaccatggaagaacattcctttactgatgagggagttgaaatttctggttacgatgctcaaaagactggtcgtcaaaccttgacgcttcattaccaaggccatgaagttagctttgatgttttggtatctccaaaagcagcattgaacgatgagtacctcaaacaaaaattagcagaagttgaagctgctaagaacaaggtggtctataactttgcttcatcagaagtaaaagaagccttcttgaaagcaattgaagcggccgaacaagtgttgaaagaccatgaaactagcacccaagatcaagtcaatgaccgacttaataaattgacagaagctcataaagctctgaatggtcaagagaaatttacggaagaaaagacagagcttgatcgcttaacaggtgaggttcaagaactcttggctgccaaaccaaaccatccttcaggttctgccctagctccgcttcttgagaaaaacaaggccttggttgaaaaagtagatttgagtccagaagagcttacaacagcgaaacagagtctaaaagatctggttgctttattgaaagaagacaagccagcagtcttttctgatagtaaaacaggtgttgaagtacacttctcaaataaagagaagactgtcatcaagggtttgaaagtagagcgtgttcaagcaagtgctgaagagaagaaatactttgctggagaagatgctcatgtctttgaaatagaaggtttggatgaaaaaggtcaagatgttgatctctcttatgcttctattgtgaaaatcccaattgaaaaagataagaaagttaagaaagtatttttcttacctgaaggcaaagaggcagtagaattggcttttgaacaaacggatagtcatgttatctttacagcacctcactttactcattatgcctttgtttatgaatctgctgaaaaaccacaacctgctaaaccagcaccacaaaacacagtccttccaaaacctacttatcaaccgacttctgatcaacaaaaggctcctaaattggaagttcaagaggaaaaggttgcctttcatcgtcaagagcatgaaaatactgagatgctagttggggaacaacgagtcatcatacagggacgagatggactgttaagacatgtctttgaagttgatgaaaacggtcagcgtcgtcttcgttcaacagaagtcatccaagaagcgattccagaaattgttgaaattggaacaaaagtaaaaacagtaccagcagtagtagctacacaggaaaaaccagctcaaaatacagcagttaaatcagaagaagcaagcaaacaattgccaaatacaggaacagctgatgctaatgaagccctaatagcaggcttagccagccttggtcttgctagtttagccttgaccttgagacggaaaagagaagataaa

SEQ ID NO: 10 - DNA, 762 bp, Artificial Sequence
  Construct 2: SP0609 nt
ttgattagccttttcggccttgctgctgccaaaccagtccaggctgatacaagtatcgcagacattcaaaaaagaggcgaactggttgtcggtgtcaaacaagacgttcccaattttggttacaaagatcccaagaccggtacttatcctggtatcgaaaccgacttggccaagatggtagctgatgaactcaaggtcaagattcgctatgtgccggttacagcacaaacccgcggcccccttctagacaatgaacaggtcgatatggatatcgcgacctttaccatcacggacgaacgcaaaaaactctacaactttaccagtccctactacacagacgcttctggatttttggtcaataaatctgccaaaatcaaaaagattgaggacctaaacggcaaaaccatcggagtcgcccaaggttctatcacccaacgcctgattactgaactgggtaaaaagaaaggtctgaagtttaaattcgtcgaacttggttcctacccagaattgattacttccctgcacgctcatcgtatcgataccttttccgttgaccgctctattctatctggctacactagtaaacggacagcactactagatgatagtttcaagccatctgactacggtattgttaccaagaaatcaaatacagagctcaacgactatcttgataacttggttactaaatggagcaaggatggtagtttgcagaaactttatgaccgttacaagctcaaaccatctagccatactgcagat

SEQ ID NO: 11 - DNA, 1077 bp, Artificial Sequence
  Construct 3: SP0749 nt
gcagtcaacactgctggtaactcagtagaggaaaagacaattaaaatcgggtttaactttgaagaatcaggttctttagctgcatacggaacagctgaacaaaaaggtgcccaattggctgttgatgaaatcaatgccgcaggtggtatcgatggaaaacaaatcgaagtagtcgataaagataataagtctgaaacagctgaggctgcttcagttacaactaaccttgtaacccaatctaaagtatcagcagtcgtaggacctgcgacatctggtgcgactgcagctgcggtagcgaacgctacaaaagcaggtgttccattgatctcaccaagtgcgactcaagatggattgactaaaggtcaagattacctctttattggaactttccaagatagcttccaaggaaaaattatctcaaactatgtttctgaaaaattaaatgctaagaaagttgttctttacactgacaatgccagtgactatgctaaagggattgcaaaatctttccgcgagtcatacaagggtgaaatcgttgcagatgaaactttcgtagcaggtgacacagacttccaagcagcccttacaaaaatgaaagggaaagactttgatgctatcgttgttcctggttactataatgaggctggtaaaattgtaaaccaagcgcgtggcatgggaattgacaaaccaatcgttggtggtgatggattcaacggtgaggagtttgtacaacaagcaactgctgaaaaagcatcaaacatctactttatctcaggcttctcaactactgtagaagtttcagctaaagctaaagccttccttgacgcttaccgtgctaagtacaatgaagagccttcaacatttgcagccttggcttatgattcagttcaccttgtagcaaacgcagcaaaaggtgctaaaaattcaggtgaaatcaagaataaccttgctaaaacaaaagattttgaaggtgtaactggtcaaacaagcttcgatgcagaccacaacacagtcaaaactgcttacatgatgaccatgaacaatggtaaagttgaagcagcagaagttgtaaaacca

SEQ ID NO: 12 - DNA, 405 bp, Artificial Sequence
  Construct 4: SP2027 nt
gaaaatcttacgaatttttacgaaaagtatcgtgtctatctgactcgtccacgtttagagcttttggcagtagttaccattgttttctgtgctgtactcgtcttttttctaaatattccaggaaaaggtgtcttaaaactcgataatggaacgattgtttatgatggcagtcttgtccgcggtaaaatgaatggccaaggtaccattaccttccaaaatggagaccaatatacaggtggcttcaacaatggagccttcaacggaaaaggtacctttcaatctaaagaaggctggacctacgaaggtgattttgtaaatggtcaggctgaaggaaaagggaaactaacaacagaacaagaagtcgtttatgaaggaacttttaaacaaggcgtttttcaacaaaaa

SEQ ID NO: 13 - DNA, 2427 bp, Artificial Sequence
  Construct 5: SP2194 nt
aactattcaaaagcattgaatggatgtatcgaaagtgcctacatggttgctggacattttggagctcgttatctagagtcgtggcacttgttgattgccatgtctaatcacagttatagtgtagcaggggcaactttaaatgattatccgtatgagatggaccgtttagaagaggtggctttggaactgactgaaacggactatagccaggatgaaacctttacggaattgccgttctcccgtcgtttgcaggttctttttgatgaagcagagtatgtagcgtcagtggtccatgctaaggtactagggacagagcacgtcctctatgcgattttgcatgatagcaatgccttggcgactcgtatcttggagagggctggtttttcttatgaagacaagaaagatcaggtcaagattgctgctcttcgtcgaaatttagaagaacgggcaggctggactcgtgaagatctcaaggctttacgccaacgccatcgtacagtagctgacaagcaaaattctatggccaatatgatgggcatgccgcagactcctagtggtggtctcgaggattatacgcatgatttgacagagcaagcgcgttctggcaagttagaaccagtcatcggtcgggacaaggaaatctcacgtatgattcaaatcttgagccggaagactaagaacaaccctgtcttggttggggatgctggtgtcgggaaaacagctctggcgcttggtcttgcccagcgtattgctagtggtgacgtgcctgcggaaatggctaagatgcgcgtgttagaacttgatttgatgaatgtcgttgcagggacacgcttccgtggtgactttgaagaacgcatgaataatatcatcaaggatattgaagaagatggccaagtcatcctctttatcgatgaactccacaccatcatgggttctggtagcgggattgattcgactctggatgcggccaatatcttgaaaccagccttggcgcgtggaactttgagaacggttggtgccactactcaggaagaatatcaaaaacatatcgaaaaagatgcggcactttctcgtcgtttcgctaaagtgacgattgaagaaccaagtgtggcagatagtatgactattttacaaggtttgaaggcgacttatgagaaacatcaccgtgtacaaatcacagatgaagcggttgaaacagcggttaagatggctcatcgttatttaaccagtcgtcacttgccagactctgctatcgatctcttggatgaggcggcagcaacagtgcaaaataaggcaaagcatgtaaaagcagacgattcagatttgagtccagctgacaaggccctgatggatggcaagtggaaacaggcagcccagctaatcgcaaaagaagaggaagtacctgtctacaaagacttggtgacagagtctgatattttgaccaccttgagtcgcttgtcaggaatcccagttcaaaaactgactcaaacggatgctaagaagtatttaaatcttgaagcagaactccataaacgggttatcggtcaagatcaagctgtttcaagcattagccgtgccattcgccgcaaccagtcagggattcgcagtcataagcgtccgattggttcctttatgttcctagggcctacaggtgtcgggaaaactgaattagccaaggctctggcagaagttctttttgacgacgaatcagcccttatccgctttgatatgagtgagtatatggagaaatttgcagctagtcgtctcaacggagctcctccaggctatgtaggatatgaagaaggtggggagttgacagagaaggttcgcaataaaccctattccgttctcctctttgatgaggtagagaaggcccacccagatatctttaatgttctcttgcaggttctggatgacggtgtcttgacagatagcaagggacgcaaggtcgatttttcaaataccattatcattatgacatcgaatctaggtgcgactgcccttcgtgatgataagactgttggttttggggctaaggatattcgttttgaccaggaaaatatggaaaaacgcatgtttgaagaactgaaaaaagcttatagaccggaattcatcaaccgtattgatgagaaggtggtcttccatagcctatctagtgatcatatgcaggaagtggtgaagattatggtcaagcctttagtggcaagtttgactgaaaaaggcattgacttgaaattacaagcttcagctctgaaattgttagcaaatcaaggatatgacccagagatgggagctcgcccacttcgcagaaccctgcaaacagaagtggaggacaagttggcagaacttcttctcaagggagatttagtggcaggcagcacacttaagattggtgtcaaagcaggccagttaaaatttgatattgca

SEQ ID NO: 14 - DNA, 753 bp, Artificial Sequence
  Construct 6: SP2216-1 nt
gaaacgactgatgacaaaattgctgctcaagataataaaattagtaacttaacagcacaacaacaagaagcccaaaaacaagttgaccaaattcaggagcaagtatcagctattcaagctgagcagtctaacttgcaagctgaaaatgatagattacaagcagaatctaagaaactcgagggtgagattacagaactttctaaaaacattgtttctcgtaaccaatcgttggaaaaacaagctcgtagtgctcaaacaaatggagccgtaactagctatatcaataccattgtaaactcaaaatcaattacagaagctatttcacgtgttgctgcaatgagtgaaatcgtatctgcaaacaacaaaatgttagaacaacaaaaggcagataaaaaagctatttctgaaaaacaagtagcaaataatgatgctatcaatactgtaattgctaatcaacaaaaattggctgatgatgctcaagcattgactacgaaacaggcagaactaaaagctgctgaattaagtcttgctgctgagaaagcgacagctgaaggggaaaaagcaagtctattagagcaaaaagcagcagctgaggcagaggctcgtgcagctgcggtagcagaagcagcttataaagaaaaacgagctagccaacaacaatcagtacttgcttcagcaaacactaacttaacagctcaagtgcaagcagtatctgaatctgcagcagcacctgtccgtgcaaaagttcgtcca

SEQ ID NO: 15 - DNA, 945 bp, Artificial Sequence
  Construct 7: SP1732-3 nt
tacctgattttgttggccagccttgtattggtggcagcttctcttatttggatactatccagaactcctgcaaccattgccattccagatgtggcaggtcagacagttgcagaggccaaggcaacgctcaaaaaagccaattttgagattggtgaggagaagacagaggctagtgaaaaggtggaagaagggcggattatccgtacagatcctggcgctggaactggtcgaaaagaaggaacgaaaatcaatttggttgtctcatcaggcaaacaatccttccaaattagtaattatgtcggccggaaatcttctgatgttatcgcggaattaaaagagaaaaaagttccagataatttgattaaaattgaggaagaagagtcgaatgagagtgaggctggaacggtcctgaagcaaagtctaccagaaggtacgacctatgacttgagcaaggcaactcaaattgttttgacagtagctaaaaaagctacgacgattcaattagggaactatattggacggaactctacagaagtaatctcagaactcaagcagaagaaggttcctgagaatttgattaagatagaggaagaagagtccagcgaaagcgaaccaggaacgattatgaaacaaagtccaggtgccggaacgacttatgatgtgagtaaacctactcaaattgtcttgacagtagctaaaaaagttacaagtgttgccatgccgagttacattggttccagcttggagtttactaagaacaatttgattcaaattgttgggattaaggaagctaatatagaagttgtagaagtgacgacagcgcctgcaggtagtgtagaaggcatggttgttgaacaaagtcctagagcaggtgaaaaggtagacctaaataagactagagtcaagatttcaatctacaaacctaaaacaacttcagctactcct

SEQ ID NO: 16 - DNA, 867 bp, Artificial Sequence
  Construct 8: SP1650 (PsaA) nt
gctagcggaaaaaaagatacaacttctggtcaaaaactaaaagttgttgctacaaactcaatcatcgctgatattactaaaaatattgctggtgacaaaattgaccttcatagtatcgttccgattgggcaagacccacacgaatacgaaccacttcctgaagacgttaagaaaacttctgaggctgatttgattttctataacggtatcaaccttgaaacaggtggcaatgcttggtttacaaaattggtagaaaatgccaagaaaactgaaaacaaagactacttcgcagtcagcgacggcgttgatgttatctaccttgaaggtcaaaatgaaaaaggaaaagaagacccacacgcttggcttaaccttgaaaacggtattatttttgctaaaaatatcgccaaacaattgagcgccaaagaccctaacaataaagaattctatgaaaaaaatctcaaagaatatactgataagttagacaaacttgataaagaaagtaaggataaatttaataagatccctgctgaaaagaaactcattgtaaccagcgaaggagcattcaaatacttctctaaagcctatggtgtcccaagtgcctacatctgggaaatcaatactgaagaagaaggaactcctgaacaaatcaagaccttggttgaaaaacttcgccaaacaaaagttccatcactctttgtagaatcaagtgtggatgaccgtccaatgaaaactgtttctcaagacacaaacatcccaatctacgcacaaatctttactgactctatcgcagaacaaggtaaagaaggcgacagctactacagcatgatgaaatacaaccttgacaagattgctgaaggattggcaaaa

SEQ ID NO: 17 - protein, 254 aa, Artificial Sequence
  Construct 2m: SP0609 aa
LISLFGLAAAKPVQADTSIADIQKRGELVVGVKQDVPNFGYKDPKTGTYSGIETDLAKMVADELKVKIRYVPVTAQTRGPLLDNEQVDMDIATFTITDERKKLYNFTSPYYTDASGFLVNKSAKIKKIEDLNGKTIGVAQGSITQRLITELGKKKGLKFKFVELGSYPELITSLHAHRIDTFSVDRSILSGYTSKRTALLDDSFKPSDYGIVTKKSNTELNDYLDNLVTKWSKDGSLQKLYDRYKLKPSSHTAD

SEQ ID NO: 18 - protein, 809 aa, Artificial Sequence
  Construct 5m: SP2194 aa
NYSKALNECIESAYMVAGHFGARYLESWHLLIAMSNHSYSVAGATLNDYPYEMDRLEEVALELTETDYSQDETFTELPFSRRLQVLFDEAEYVASVVHAKVLGTEHVLYAILHDSNALATRILERAGFSYEDKKDQVKIAALRRNLEERAGWTREDLKALRQRHRTVADKQNSMANMMGMPQTPSGGLEDYTHDLTEQARSGKLEPVIGRDKEISRMIQILSRKTKNNPVLVGDAGVGKTALALGLAQRIASGDVPAEMAKMRVLELDLMNVVAGTRFRGDFEERMNNIIKDIEEDGQVILFIDELHTIMGSGSGIDSTLDAANILKPALARGTLRTVGATTQEEYQKHIEKDAALSRRFAKVTIEEPSVADSMTILQGLKATYEKHHRVQITDEAVETAVKMAHRYLTSRHLPDSAIDLLDEAAATVQNKAKHVKADDSDLSPADKALMDGKWKQAAQLIAKEEEVPVYKDLVTESDILTTLSRLSGIPVQKLTQTDAKKYLNLEAELHKRVIGQDQAVSSISRAIRRNQSGIRSHKRPIGSFMFLGPTGVGKTELAKALAEVLFDDESALIRFDMSEYMEKFAASRLNGAPPGYVGYEEGGELTEKVRNKPYSVLLFDEVEKAHPDIFNVLLQVLDDGVLTDSKGRKVDFSNTIIIMTSNLGATALRDDKTVGFGAKDIRFDQENMEKRMFEELKKAYRPEFINRIDEKVVFHSLSSDHMQEVVKIMVKPLVASLTEKGIDLKLQASALKLLANQGYDPEMGARPLRRTLQTEVEDKLAELLLKGDLVAGSTLKIGVKAGQLKFDIA

SEQ ID NO: 19 - DNA, 27 bp, Artificial Sequence
  ICC5875 primer
tgtgattatcatggttctagagtttga

SEQ ID NO: 20 - DNA, 24 bp, Artificial Sequence
  ICC6198 primer
tgcaaacagttattggtttttgtc

SEQ ID NO: 21 - DNA, 21 bp, Artificial Sequence
  ICC5876 primer
ggatggtttaccttagcagca

SEQ ID NO: 22 - DNA, 21 bp, Artificial Sequence
  ICC5877 primer
tgatggctatttcatcaacca

SEQ ID NO: 23 - DNA, 21 bp, Artificial Sequence
  ICC5878 primer
cgcttcttgggcatttttaag

SEQ ID NO: 24 - DNA, 20 bp, Artificial Sequence
  ICC5879 primer
cgagcatgaaggtgctgtaa

SEQ ID NO: 25 - DNA, 21 bp, Artificial Sequence
  ICC5880 primer
ccacctctaaggtccaaatcc

SEQ ID NO: 26 - DNA, 20 bp, Artificial Sequence
  ICC5881 primer
cctagcagtttccgttccaa

SEQ ID NO: 27 - DNA, 20 bp, Artificial Sequence
  ICC5882 primer
cacttgcttgaacacgctct

SEQ ID NO: 28 - DNA, 25 bp, Artificial Sequence
  ICC5883 primer
cagagtctaaaagatctggttgctt

SEQ ID NO: 29 - DNA, 22 bp, Artificial Sequence
  ICC5884 primer
tttgccatgttacaaaaactcc

SEQ ID NO: 30 - DNA, 20 bp, Artificial Sequence
  ICC5885 primer
ttgacaatccaagcgaacct

SEQ ID NO: 31 - DNA, 23 bp, Artificial Sequence
  ICC5886 primer
aagaggaaaccattgaaaaattg

SEQ ID NO: 32 - DNA, 23 bp, Artificial Sequence
  ICC5887 primer
tcatcgaaaaagttcaaggaaaa

SEQ ID NO: 33 - DNA, 20 bp, Artificial Sequence
  ICC5888 primer
cgttgacgcagtttgaagag

SEQ ID NO: 34 - DNA, 20 bp, Artificial Sequence
  ICC5889 primer
tagcgaacgctacaaaagca

SEQ ID NO: 35 - DNA, 21 bp, Artificial Sequence
  ICC5890 primer
ccagacccttggtatacagga

SEQ ID NO: 36 - DNA, 20 bp, Artificial Sequence
  ICC5891 primer
ttgcttggaagagggatttg

SEQ ID NO: 37 - DNA, 20 bp, Artificial Sequence
  ICC5892 primer
ctttggatcgcgttttagga

SEQ ID NO: 38 - DNA, 20 bp, Artificial Sequence
  ICC5893 primer
gccaaggctggtttcaagat

SEQ ID NO: 39 - DNA, 20 bp, Artificial Sequence
  ICC5894 primer
tgaagaagatggccaagtca

SEQ ID NO: 40 - DNA, 20 bp, Artificial Sequence
  ICC5895 primer
agacaccgtcatccagaacc

SEQ ID NO: 41 - DNA, 20 bp, Artificial Sequence
  ICC5896 primer
ggagctcctccaggctatgt

SEQ ID NO: 42 - DNA, 19 bp, Artificial Sequence
  ICC5897 primer
gcggctagctgcctagttt

SEQ ID NO: 43 - DNA, 20 bp, Artificial Sequence
  ICC6004 primer
aacgatccgtggttttcatc

SEQ ID NO: 44 - DNA, 28 bp, Artificial Sequence
  ICC6279 primer
gatagagctgacgtggtttgaagagatt

SEQ ID NO: 45 - protein, 1646 aa, Streptococcus pneumoniae Pj-102-59
MKNPFFERRCRYSIRKLSVGACSLMIGAVLFAGPALAEETAVPENSGANPELVSGESEHSTNEADKQNEGEHARENKLEKAEGVAIASETAEAASAAKPEEKASEVVAETPSAEAKPKSDKETEAKPEATNQGDESKPAAEANKTEKEVQPDVPKNTEKTLKPKEIKFNSWEELLKWEPGAREDDAINRGSVVLASRRTGHLVNEKASKEAKVQALSNTNSKAKDHASVGGEEFKAYAFDYWQYLDSMVFWEGLVPTPDVIDAGHRNGVPVYGTLFFNWSNSIADQERFAEALKQDADGSFPIARKLVDMAKYYGYDGYFINQETTGDLVKPLGEKMRQFMLYSKEYAAKVNHPIKYSWYDAMTYNYGRYHQDGLGEYNYQFMQPEGDKVPADNFFANFNWDKAKNDYTIATANWIGRNPYDVFAGLELQQGGSYKTKVKWNDILDENGKLRLSLGLFAPDTITSLGKTGEDYHKNEDIFFTGYQGDPTGQKPGDKDWYGIANLVADRTPAVGNTFTTSFNTGHGKKWFVDGKVSKDSEWNYRSVSGVLPTWRWWQTSTGEKLRAEYDFTDAYNGGNSLKFSGDVAGKTDQDVRLYSTKLEVTEKTKLRVAHKGGKGSKVYMAFSTTPDYKFDDADAWKELTLSDNWTNEEFALSSLAGKTIYAVKLFFEHEGAVKDYQFHLGQLTISDNHQEPQSPTSFSVVKQSLKNAQEAEAVVQFKGNKDADFYEVYEKDGDSWKLLTGSSSTTIYLPKVSRSASAQGTTQELKVVAVGKNGVRSEAATTTFDWGMTVKDTSLPKPLAENIVPGATVIDSTFPKTEGGEGIEGMLNGTITSLSDKWSSAQLSGSVDIRLTKPRTVVRWVMDHAGAGGESVNDGLMNTKDFDLYYKDADGEWKLAKEVRGNKAHVTDITLDKPITAQDWRLNVVTSDNGTPWKAIRIYNWKMYEKLDTESVNIPMAKAAARSLGNNKVQVGFADVPAGATITVYDNPNSQTPLATLKSEVGGDLASAPLDLTNQSGLLYYRTQLPGKEISNVLAVSVPKDDRRIKSVSLETGPKKTSYAEGEDLDLRGGVLRVQYEGGTEDELIRLTHAGVSVSGFDTHHKGEQNLTLQYLGQPVNANLSVTVTGQDEASPKTILGIEVSQEPKKDYLVGDNLDLSEGRFAVAYSNDTMEEHSFTDEGVEISGYDAQKTGRQTLTLRYQGHEVNFDVLVSPKAALNDEYLKQKLAEVEAAKNKVVYNFASPEVKEAFLKAIEAAEQVLKDHETSTQDQVNDRLNKLTEAHKALNGQEKFTEEKTELDRLTGEAQELLAAKPNHPSGSALAPLLEKNKALVEKVDLSPEELATAKQSLKDLVALLKEDKSAVFSDSKTGVEVHFSNKEKTVIKGLKVERVQASAEEKKYFAGEDAHVFEIEGLDEKGQDVDLSYASIVKIPIEKDKKVKKVFFLPEGKEAVELAFEQTDSHVIFTAPHFTHYAFVYESAEKPQPAKPAPQNKVLPKPTYQPASDQQKAPKLEVQEEKVAFHRQEHENAEMLVGEQRVIIQGRDGLLRHVFEVDENGQRRLRSTEVIQEAIPEIVEIGTKVKTVPAVVATQEKPAQNTAVKSEEASKQLPNTGTADANEALIAGLASLGLASLALTLRRKREDKD

SEQ ID NO: 46 - protein, 1659 aa, Streptococcus pneumoniae Pj-102-62
MKNPFFERRCRYSIRKLSVGACSLMIGAVLFAGPALAEETAVPENSGANTELVSGESEHSTNEADKQNEGEHARENKLEKAEGVAIASETASPASNEAATTETAEAASAAKPEEKASEVVAETPSAEAKPKSDKETEAKPEATNQGDESKPAAEANKTEKEVQPDVPKNTEKTLKPKEIKFNSWEELLKWEPGAREDDAINRGSVVLASRRTGHLVNEKASKEAKVQALSNTNSKAKDHASVGGEEFKAYAFDYWQYLDSMVFWEGLVPTPDVIDAGHRNGVPVYGTLFFNWSNSIADQERFAEALKQDADGSFPIARKLVDMAKYYGYDGYFINQETTGDLVKPLGEKMRQFMLYSKEYAAKVNHPIKYSWYDAMTYNYGRYHQDGLGEYNYQFMQPEGDKVPADNFFANFNWDKAKNDYTIATANWIGRNPYDVFAGLELQQGGSYKTKVKWNDILDENGKLRLSLGLFAPDTITSLGKTGEDYHKNEDIFFTGYQGDPTGQKPGDKDWYGIANLVADRTPAVGNTFTTSFNTGHGKKWFVDGKVSKDSEWNYRSVSGVLPTWRWWQTSTGEKLRAEYDFTDAYNGGNSLKFSGDVAGKTDQDVRLYSTKLEVTEKTKLRVAHKGGKGSKVYMAFSTTSDYKFDDADAWKELTLSDNWTNEEFDLSSLAGKTIYAVKLFFEHEGAVKDYQFNLGQLTISDNHQEPQSPTSFSVVKQSLKNAQEAEAVVQFKGNKDADFYEVYEKDGDSWKLLTGSSSTTIYLPKVSRSASAQGTTQELKVVAVGKNGVRSEAATTTFDWGMTVKDTSLPKPLAENIVPGATVIDSTFPKTEGGEGIEGMLNGTITSLSDKWSSAQLSGSVDIRLTKPRTVVRWVMDHAGAGGESVNDGLMNTKDFDLYYKDADGEWKLAKEVRGNKAHVTDITLDKPITAQDWRLNVVTSDNGTPWKAIRIYNWKMYEKLDTESVNIPMAKAAARSLGNNKVQVGFADVQAGATITVYDNPNSQTPLATLKSEVGGDLASAPLDLTNQSGLLYYRTQLPGKEISNVLAVSVPKDDRRIKSVSLETGPKKTSYAEGEDLDLRGGVLRVQYEGGTEDELIRLTHAGVSVSGFDTHHKGEQNLTLQYLGQPVNANLSVTVTGQDEASPKTILGIEVSQEPKKDYLVGDSLNLSEGRFAVAYSNDTMEEHSFTDEGVEISGYDAQKTGRQTLTLRYQGHEFNFDVLVSPKAALNDEYLKQKLAEVEAAKNKVVYNFASPEVKEAFLKAIEAAEQVLKDHETSTQDQVNDRLNKLTEAHKALNGQEKFKEEKTELDRLTGEVQELLAAKPNHPSGSALAPLLEKNKALVEKVDLSPEELATAKQSLKDLVALLKEDKPAVFSDSKTGVEVHFSNKEKTVIKGLKVERVQASAEEKKYFAGEDAHVFEIEGLDEKGQDVDLSYASIVKIPIEKDKKVKKVFFLPEGKEAVELTFEQTDSHVIFTAPHFTHYAFVYESAEKPQPAKPAPQNKVLPKPTYQPASDQQKAPKLEVQEEKVAFHRQEHENAEMLVGEQRVIIQGRDGLLRHVFEVDENGQRRLRSTEVIQEAIPEIVEIGTKVKTVPAVVATQEKPAQNTAVKSEEASKQLPNTGTADANEALIAGLASLGLASLALTLRRKREDKD

SEQ ID NO: 47 - protein, 1659 aa, Streptococcus pneumoniae Pj-102-70; identical to SEQ ID NO: 46

SEQ ID NO: 48 - protein, 1646 aa, Streptococcus pneumoniae Pj-102-77
MKNPFFERRCRYSIRKLSVGACSLMIGAVLFAGPALAEETAVPENSGANTELVSGESEHSINEADKQNEGEHTRENKLEKAEGVATASETAEAASAAKPEEKASEVVAETPSAEAKPKSDKETEAKPEATNQGDESKPAAEANKTEKEVQPDVPKNTEKTLKPKEIKFNSWEELLKWEPGAREDDAINRGSVVLASRRTGHLVNEKASKEAKVQALSNTNSKAKDHASVGGEEFKAYAFDYWQYLDSMVFWEGLVPTPDVIDAGHRNGVPVYGTLFFNWSNSIADQERFAEALKQDADGSFPIARKLVDMAKYYGYDGYFINQETTGDLVKPLGEKMRQFMLYSKAYAAKVNHPIKYSWYDAMTYNYGRYHQDGLGEYNYQFMQPEGDKVPADNFFANFNWDKAKNDYTIATANWIGRNPYDVFAGLELQQGGSYKTKVKWNDILDENGKLRLSLGLFAPDTITSLGKTGEDYHKNEDIFFTGYQGDPTGQKPGDKDWYGIANLVADRTPAVGNTFTTSFNTGHGKKWFVDGKVSKDSEWNYRSVSGVLPTWRWWQTSTGEKLRAEYDFTDAYNGGNSLKFSGDVAGKTDQDVRLYSTKLEVTEKTKLRVAHKGGKGSKVYMAFSTTPDYKFDDADAWKELTLSDNWTNEEFDLSSLAGKTIYAVKLFFEHEGAVKDYQFNLGQLTISDNHQEPQSPTSFSVVKQSLKNAQEAEAVVQFKGNKDADFYEVYEKDGDSWKLLTGSSSTTIYLPKVSRSASAQGTTQELKVVAVGKNGVRSEAATTTFDWGMTVKDTSLPKPLAENIVPGATVIDSTFPKTEGGEGIEGMLNGTITSLSDKWSSAQLSGSVDIRLTKPRTVVRWVMDHAGAGGESVNDGLMNTKDFDLYYKDADGEWKLAKEVRGNKAHVTDITLDKPITAQDWRLNVVTSDNGTPWKAIRIYNWKMYEKLDTESVNIPMAKAAARSLGNNKVQVGFADVPAGATITVYDNPNSQTPLATLKSEVGGDLASAPLDLTNQSGLLYYRTQLPGKEISNVLAVSVPKDDRRIKSVSLETGPKKTSYAEGEDLDLRGGVLRVQYEGGTEDELIRLTHAGVSVSGFDTHHKGEQNLTLQYLGQPVNANLSVTVTGQDEASPKTILGIEVSQEPKKDYLVGDSLDLSEGRFAVAYSNDTMEEHSFTDEGVEISGYDAQKTGRQTLTLRYQGHEVNFDVLVSPKAALNDEYLKQKLAEVEAAKNKVVYNFASPEVKEAFLKAIEAAEQVLKDHETSTQDQVNDRLNKLTEAHKALNGQEKFTEEKTELDRLTGEAQELLAAKPNHPSGSALAPLLEKNKALVEKVDLSPEELATAKQSLKDLVALLKEDKSAVFSDSKTGVEVHFSNKEKTVIKGLKVERVQASAEEKKYFAGEDAHVFEIEGLDEKGQDVDLSYASIVKIPIEKDKKVKKVFFLPEGKEAVELAFEQTDSHVIFTAPHFTHYAFVYESAEKPQPAKPAPQNKVLPKPTYQPASDQQKAPKLEVQEEKVAFHRQEHENAEMLVGEQRVIIQGRDGLLRHVFEVDENGQRRLRSTEVIQEAIPEIVEIGTKVKTVPAVVATQEKPAQNTAVKSEEASKQLPNTGTADANEALIAGLASLGLASLALTLRRKREDKD

SEQ ID NO: 49 - protein, 1646 aa, Streptococcus pneumoniae Pj-102-93
MKNPFFERRCRYSIRKLSVGACSLMIGAVLFAGPALAEETAVPENSGANTELVSGESEHSTNEADKQNEGEHTRENKLEKAEGVATASETAEAASAAKPEEKASEVVAETPSAEAKPKSDKETEAKPEATNQGDESKPAAEANKTEKEVQPDVPKNTEKTLKPKEIKFNSWEELLKWEPGAREDDAINRGSVVLASRRTGHLVNEKASKEAKVQALSNTNSKAKDHASVGGEEFKAYAFDYWQYLDSMVFWEGLVPTPDVIDAGHRNGVPVYGTLFFNWSNSIADQERFAEALKQDADGSFPIARKLVDMAKYYGYDGYFINQETTGDLVKPLGEKMRQFMLYSKEYAAKVNHPIKYSWYDAMTYNYGRYHQDGLGEYNYQFMQPEGDKVPADNFFANFNWDKAKNDYTIATANWIGRNPYDVFAGLELQQGGSYKTKVKWNDILDENGKLRLSLGLFAPDTITSLGKTGEDYHKNEDIFFTGYQGDPTGQKPGDKDWYGIANLVADRTPAVGNTFTTSFNTGHGKKWFVDGKVSKDSEWNYRSVSGVLPTWRWWQTSTGEKLRAEYDFTDAYNGGNSLKFSGDVAGKTDQDVRLYSTKLEVTEKTKLRVAHKGGKGSKVYMAFSTTPDYKFDDADAWKELTLSDNWTNEEFDLSSLAGKTIYAVKLFFEHEGAVKDYQFNLGQLTISDNHQEPQSPTSFSVVKQSLKNAQEAEAVVQFKGNKDADFYEVYEKDGDSWKLLTGSSSTTIYLPKVSRSASAQGTTQELKVVAVGKNGVRSEAATTTFDWGMTVKDTSLPKPLAENIVPGATVIDSTFPKTEGGEGIEGMLNGTITSLSDKWSSAQLSGSVDIRLTKPRTVVRWVMDHAGAGGESVNDGLMNTKDFDLYYKDADGEWKLAKEVRGNKAHVTDITLDKPITAQDWRLNVVTSDNGTPWKAIRIYNWKMYEKLDTESVNIPMAKAAARSLGNNKVQVGFADVPAGATITVYDNPNSQTPLATLKSEVGGDLASAPLDLTNQSGLLYYRTQLPGKEISNVLAVSVPKDDRRIKSVSLETGPKKTSYAEGEDLDLRGGVLRVQYEGGTEDELIRLTHAGVSVSGFDTHHKGEQNLTLQYLGQPVNANLSVTVTGQDEASPKTILGIEVSQEPKKDYLVGDSLDLSEGRFAVAYSNDTMEEHSFTDEGVEISGYDAQKTGRQTLTLRYQGHEVNFDVLVSPKAALNDEYLKQKLAEVEAAKNKVVYNFASPEVKEAFLKAIEAAEQVLKDHETSTQDQVNDRLNKLTEAHKALNGQEKFTEEKTELDRLTGEVQELLAAKPNHPSGSALAPLLEKNKALVEKVDLSPEELTTTKQSLKDLVALLKEDKPAVFSDSKTGVEVHFSNKEKTVIKGLKVERVQASAEEKKYFAGEDAHVFEIEGLDEKGQDVDLSYASIVKIPIEKDKKVKKVFFLPEGKGAVELAFEQTDSHVIFTAPHFTHYAFVYESAEKPQPAKPAPQNKVLPKPTYQPASDQQKAPKLEVQEEKVAFHRQEHENTEMLVGEQRVIIQGRDGLLRHVFEVDENGQRRLRSTEVIQEAIPEIVEIGTKVKTVPAVVATQEKPAQNTAVKSEEASKQLPNTGTADANEALIAGLASLGLASLALTLRRKREDKD

SEQ ID NO: 50 - protein, 1659 aa, Streptococcus pneumoniae Pj-102-94
MKNPFFERRCRYSIRKLSVGACSLMIGAVLFAGPALAEETAVPENSRANTELVSGESEHSTNEADKQNEGEHARENKLEKAEGVATASETASPASNEAATTETAEAASAAKPEEKASEVVAETPSAEAKPKSDKETEAKPEATNQGDESKPAEEANKTEKEVQPDVPKNTEKTLKPKEIKFNSWEELLKWEPGAREDDAINRGSVVLASRRTGHLVNEKASKEAKVQALSNTNSKAKDHASVGGEEFKAYAFDYWQYLDSMVFWEGLVPTPDVIDAGHRNGVPVYGTLFFNWSNSIADQERFAEALKQDADGSFPIARKLVDMAKYYGYDGYFINQETTGDLVKPLGEKMRQFMLYSKEYAAKVNHPIKYSWYDAMTYNYGRYHQDGLGEYNYQFMQPEGDKVPADNFFANFNWDKAKNDYTIATANWIGRNPYDVFAGLELQQGGSYKTKVKWNDILDENGKLRLSLGLFAPDTITSLGKTGEDYHKNEDIFFTGYQGDPTGQKPGDKDWYGIANLVADRTPAVGNTFTTSFNTGHGKKWFVDGKVSKDSEWNYRSVSGVLPTWRWWQTSTGEKLRAEYDFTDAYNGGNSLKFSGDVAGKTDQDVRLYSTKLEVTEKTKLRVAHKGGKGSKVYMAFSTTPDYKFDDADAWKELTLSDNWTNEEFDLSSLAGKTIYAVKLFFEHEGAVKDYQFNLGQLTISDNHQEPQSPTSFSVVKQSLKNAQEAEAVVQFKGNKDADFYEVYEKDGDSWKLLTGSSSTTIYLPKVSRSASAQGTTQELKVVAVGKNGVRSEAATTTFDWGMTVKDTSLPKPLAENIVPGATVIDSTFPKTEGGEGIEGMLNGTITSLSDKWSSAQLSGSVDIRLTKPRTVVRWVMDHAGAGGESVNDGLMNTKDFDLYYKDADGEWKLAKEVRGNKAHVTDITLDKPITAQDWRLNVVTSDNGTPWKAIRIYNWKMYEKLDTESVNIPMAKAAARSLGNNKVQVGFADVPAGATITVYDNPNSQTPLATLKSEVGGDLASAPLDLTNQSGLLYYRTQLPGKEISNVLAVSVPKDDRRIKSVSLETGPKKTSYAEGEDLDLRGGVLRVQYEGGTEDELIRLTHAGVSVSGFDTHHKGEQNLTLQYLGQPVNANLSVTVTGQDEASPKTILGIEVSQEPKKDYLVGDSLDLSEGRFAVAYSNDTMEEHSFTDEGVEISGYDAQKTGRQTLTLRYQGHEVNFDVLVSPKAALNDEYLKQKLAEVEAAKNKVVYNFASPEVKEAFLKAIEAAEQVLKDHETSTQDQVNDRLNKLTEAHKALNGQEKFKEEKTELDRLTGEVQELLAAKPNHPSGSALAPLLEKNKALVEKVDLSPEELATAKQSLKDLVALLKEDKSAVFSDSKTGVEVHFSNKEKTVIKGLKVERVQASAEEKKYFAGEDAHVFEIEGLDEKGQDVDLSYASIVKIPIEKDKKVKKVFFLPEGKEAVELAFEQTDSHVIFTAPHFTHYAFVYESAEKPQPAKPAPQNTVLPKPTYQPASDQQKAPKLEVQEEKVAFHRQEHENAEMLVGEQRVIIQGRDGLLRHVFEVDENGQRRLRSTEVIQEAIPEIVEIGTKVKTVPAVVATQEKPAQNTAVKSEEASKQLPNTGTADANEALIAGLASLGLASLALTLRRKREDKD

SEQ ID NO: 51 - protein, 1659 aa, Streptococcus pneumoniae Pj-102-98
MKNPFFERRCRYSIRKLSVGACSLMIGAVLFAGPALAEETAVPENSGANTELVSGESEHSTNEADKQNEGEHARENKLEKAEGVAIASETASPASNEAATTETAEAASAAKPEEKASEVVAETPSAEAKPKSDKETEAKPEATNQGDESKPAAEANKTEKEVQPDVPKNTEKTLKPKEIKFNSWEELLKWEPGAREDDAINRGSVVLASRRTGHLVNEKASKEAKVQALSNTNSKAKDHASVGGEEFKAYAFDYWQYLDSMVFWEGLVPTPDVIDAGHRNGVPVYGTLFFNWSNSIADQERFAEALKQDADGSFPIARKLVDMAKYYGYDGYFINQETTGDLVKPLGEKMRQFMLYSKEYAAKVNHPIKYSWYDAMTYNYGRYHQDGLGEYNYQFMQPEGDKVPADNFFANFNWDKAKNDYTIATANWIGRNPYDVFAGLELQQGGSYKTKVKWNDILDENGKLRLSLGLFAPDTITSLGKTGEDYHKNEDIFFTGYQGDPTGQKPGDKDWYGIANLVADRTPAVGNTFTTSFNTGHGKKWFVDGKVSKDSEWNYRSVSGVLPTWRWWQTSTGEKLRAEYDFTDAYNGGNSLKFSGDVAGKTDQDVRLYSTKLEVTEKTKLRVAHKGGKGSKVYMAFSTTPDYKFDDADAWKELTLSDNWTNEEFDLSSLAGKTIYAVKLFFEHKGAVKDYQFNLGQLTISDNHQEPQSPTSFSVVKQSLKNAQEAEAVVQFKGNKDADFYEVYEKDGDSWKLLTGSSSTTIYLPKVSRSASAQGTTQELKVVAVGKNGVRSEAATTTFDWGMTVKDTSLPKPLAENIVPGATVIDSTFPKTEGGEGIEGMLNGTITSLSDKWSSAQLSGSVDIRLTKPRTVVRWVMDHAGAGGESVNDGLMNTKDFDLYYKDADGEWKLAKEVRGNKAHVTDITLDKPITAQDWRLNVVTSDNGTPWKAIRIYNWKMYEKLDTESVNIPMAKAAARSLGNNKVQVGFADVPAGATITVYDNPNSQTPLATLKSEVGGDLASAPLDLTNQSGLLYYRTQLPGKEISNVLAVSVPKDDRRIKSVSLETGPKKTSYAEGEDLDLRGGVLRVQYEGGTEDELIRLTHAGVSVSGFDTHHKGEQNLTLQYLGQPVNANLSVTVTGQDEASPKTILGIEVSQEPKKDYLVGDSLDLSEGRFAVAYSNDTMEEHSFTDEGVEISGYDAQKTGRQTLTLHYQGHEVSFDVLVSPKAALNDEYLKQKLAEVEAAKNKVVYNFASSEVKEAFLKAIEAAEQVLKDHETSTQDQVNDRLNKLTEAHKALNGQEKFKEEKTELDRLTGEVQELLAAKPNHPSGSALAPLLEKNKALVEKVDLSPEELATAKQSLKDLVALLKEDKPAVFSDSKTGVEVHFSNKEKTVIKGLKVERVQASAEEKKYFAGEDAHVFEIEGLDEKGQDVDLSYASIVKIPIEKDKKVKKVFFLPEGKEAVELAFEQTDSHVIFTAPHFTHYAFVYESAEKPQPAKPAPQNKVLPKPTYQPASDQQKAPKLEVQEEKVAFHRQEHENAEMLVGEQRVIIQGRDGLLRHVFEVDENGQRRLRSTEVIQEAIPEIVEIGTKVKTVPAVVATQEKPAQNTAVKSEEASKQLPNTGTADANEALIAGLASLGLASLALTLRRKREDKD

SEQ ID NO: 52 - protein, 1659 aa, Streptococcus pneumoniae Pj-102-148
MKNPFFERRCRYSIRKLSVGACSLMIGAVLFAGPALAEETAVPENSGANTELVSGESEHSTNEADKQNEGEHARENKLEKAEGVATASETASPASNEAATTETAEAASAAKPEEKASEVVAETPSAEAKPKSDKETEAKPEATNQGDESKPAEEANKTEKEVQPDVPKNTEKTLKPKEIKFNSWEELLKWEPGVREDDAINRGSVVLASRRTGHLVNEKASKEAKVQTLSNTNSKAKDHASVGGEEFKAYAFDYWQYLDSMVFWEGLVPTPDVIDAGHRNGVPVYGTLFFNWSNSIADQERFAEALKQDADGSFPIARKLVDMAKYYGYDGYFINQETTGDLVKPLGEKMRQFMLYSKEYAAKVNHPIKYSWYDAMTYNYGRYHQDGLGEYNYQFMQPEGDKVPADNFFANFNWDKAKNDYTIATANWIGRNPYDVFAGLELQQGGSYKTKVKWNDILDENGKLRLSLGLFAPDTITSLGKTGEDYHKNEDIFFTGYQGDPTGQKPGDKDWYGIANLVADRTPAVGNTFTTSFNTGHGKKWFVDGKVSKDSEWNYRSVSGVLPTWRWWQTSTGEKLRAEYDFTDAYNGGNSLKFSGDVAGKTDQDVRLYSTKLEVTEKTKLRVAHKGGKGSKVYMAFSTTPDYKFDDADAWKELTLSDNWTNEEFDLSSLAGKTIYAVKLFFEHEGAVKDYQFNLGQLTISDNHQEPQSPTSFSVVKQSLKNAQEAEAVVQFKGNKDADFYEVYEKDGDSWKLLTGSSSTTIYLPKVSRSASAQGTTQELKVVAVGKNGVRSEAATTTFDWGMTVKDTSLPKPLAENIVPGATVIDSTFPKTEGGEGIEGMLNGTITSLSDKWSSAQLSGSVDIRLTKPRTVVRWVMDHAGAGGESVNDGLMNTKDFDLYYKDADGEWKLAKEVRGNKAHVTDITLDKPITAQDWRLNVVTSDNGTPWKAIRIYNWKMYEKLDTESVNIPMAKAAARSLGNNKVQVGFADVPAGATITVYDNPNSQIPLATLKSEVGGDLASAPLDLTNQSGLLYYRTQLPGKEISNVLAVSVPKDDRRIKSVSLETGPKKTSYAEGEDLDLRGGVLRVQYEGGTEDELIRLTHAGVSVSGFDTHHKGEQNLTLQYLGQPVNANLSVTVTGQDEASPKTILGIEVSQEPKKNYLVGDSLDLSEGCFAVAYSNDTMEEHSFTDEGVEISGYDAQKTGRQTLTLRYQGHEVNFDVLVSPKAALNDEYLKQKLAEVEAAKNKVVYNFASPEVKEAFLKAIEAAEQVLKDHEISTQDQVNDRLNKLTEAHKALNGQEKFKEEKTELDRLTGEVQELLAAKPNHPSGSALAPLLEKNKALVEKVDLSPEELATAKQSLKDLVALLKEDKPAVFSDSKTGVEVHFSNKEKTVIKGLKVERVQASAEEKKYFAGEDAHVFEIEGLDEKGQDVDLSYASIVKIPIEKDKKVKKVFFLPEGKEAVELAFEQTDSHVIFTAPHFTHYAFVYESAEKPQPAKPAPQNTVLPKPTYQPASDQQKAPKLEVQEEKVAFHRQEHENAEMLVGEQRVIIQGRDGLLRHVFEVDENGQRRLRSTEVIQEAIPEIVEIGTKVKTVPAVVAIQEKPAQNTAVKSEEASKQLPNTGTADANEALIAGLASLGLASLALTLRRKREDKD

SEQ ID NO: 53 - protein, 1634 aa, Streptococcus pneumoniae Pj-102-160
MKNPFFERRCRYSIRKLSVGACSLMIGAVLFAGPALAEETAVPENSGANTELVSGESEHSTNEADKQNEGEHTRENKLEKAEGVATASETAEAASAAKPEEKASEAVAETPSAEAKPKSDKETEAKPEATNQGDESKPAAEANKTEKEVQPDVPKNTEKTLKPKEIKFNSWEELLKWEPGAREDDAINRGSVVLASRRTGHLVNEKASKEAKDHASVGGEEFKAYAFDYWQYLDSMVFWEGLVPTPDVIDAGHRNGVPVYGTLFFNWSNSIADQERFAEALKQDADGSFPIARKLVDMAKYYGYDGYFINQETTGDLVKPLGEKMRQFMLYSKEYAAKVNHPIKYSWYDAMTYNYGRYHQDGLGEYNYQFMQPEGDKVPADNFFANFNWDKAKNDYTIATANWIGRNPYDVFAGLELQQGGSYKTKVKWNDILDENGKLRLSLGLFAPDTITSLGKTGEDYHKNEDIFFTGYQGDPTGQKPGDKDWYGIANLVADRTPAVGNTFTTSFNTGHGKKWFVDGKVSKDSEWNYRSVSGVLPTWRWWQTSTGEKLRAEYDFTDAYNGGNSLKFSGDVAGKTVQDVRLYSTKLEVTEKTKLRVAHKGGKGSKVYMAFSTTSDYKFDDADAWKELTLSDNWTNEEFDLSSLAGKTIYAVKLFFEHEGAVKDYQFNLGQLTISDNHQEPQSPTSFSVVKQSLKNAQEAEAVVQFKGNKDADFYEVYEKDGDSWKLLTGSSSTTIYLPKVSRSASAQGTTQELKVVAVGKNGVRSEAATTTFDWGMTVKDTSLPKPLAENIVPGATVIDSTFPKTEGGEGIEGMLNGTITSLSDKWSSAQLSGSVDIRLTKPRTVVRWVMDHAGAGGESVNDGLMNTKDFDLYYKDADGEWKLAKEVRGNKAHVTDITLDKPITAQDWRLNVVTSDNGTPWKAIRIYNWKMYEKLDTESVNIPMAKAAARSLGNNKVQVGFSDVPAGATITVYDNPNSQTPLATLKSEVGGDLASAPLDLTNQSGLLYYRTQLPGKEISNVLAVSVPKDDRRIKSVSLETGPKKTSYAEGEDLDLRGGVLRVQYEGGTEDELIRLTHAGVSVSGFDTHHKGEQNLTLQYLGQPVNANLSVTVTGKDEASPKTILGIEVSQEPKKDYLVGDSLDLSEGRFAVAYSNDTMEEHSFTDEGVEISGYDAQKTGRQTLTLHYQGHEVSFDVLVSPKAALNDEYLKQKLAEVEAAKNKVVYNFASPEVKEAFLKAIEAAEQVLKDHETSTQDQVNDRLNKLTEAHKALNGQEKFKEEKTELDRLTGEVQELLAAKPNHPSGSALAPLLEKNKALVEKVDLSPEELTTAKQSLKDLVALLKEDKPAVFSDSKTGVEVHFSNKEKTVIKGLKVERVQASAEEKKYFAGEDAHVFEIEGLDEKGQDVDLSYASIVKIPIEKDKKVKKVFFLPEGKEAVELAFEQTDSHVIFTAPHFTHYAFVYESAEKPQPAKPAPQNTVLPKPTYQPASDQQKAPKLEVQEEKVAFHRQEHENAEMLVGEQRVIIQGRDGLLRHVFEVDENGQRRLRSTEVIQEAIPEIVEIGTKVKTVPAVVATQEKPAQNTAVKSEEASKQLPNTGTADANEALIAGLASLGLASLALTLRRKREDKD

SEQ ID NO: 54 - protein, 1659 aa, Streptococcus pneumoniae Pj-102-161
MKNPFFERRCRYSIRKLSVGACSLMIGAVLFAGPALAEETAVPENSGANTELVSGESEHSTNEADKQNKGEHARENKLEKAEGVAIASETASPASNEAATTETAEAASAAKPEEKASEVVAETPSAEAKPKSDKETEAKPEATNQGDESKPAAEANKTEKEVQPDVPKNTEKTLKPKEIKFNSWEELLKWEPGAREDDAINRGSVVLASRRTGHLVNEKASKEAKVQALSNTNSKAKDHASVGGEEFKAYAFDYWQYLDSMVFWEGLVPTPDVIDAGHRNGVPVYGTLFFNWSNSIADQERFAEALKQDADGSFPIARKLVDMAKYYGYDGYFINQETTGDLVKPLGEKMRQFMLYSKEYAAKVNHPIKYSWYDAMTYNYGRYHQDGLGEYNYQFMQPEGDKVPADNFFANFNWDKAKNDYTIATANWIGRNPYDVFAGLELQQGGSYKTKVKWNDILDENGKLRLSLGLFAPDTITSLGKTGEDYHKNEDIFFTGYQGDPTGQKPGDKDWYGIANLVADRTPAVGNTFTTSFNTGHGKKWFVDGKVSKDSEWNYRSVSGVLPTWRWWQTSTGEKLRAEYDFTDAYNGGNSLKFSGDVAGKTDQDVRLYSTKLEVTEKTKLRVAHKGGKGSKVYMAFSTTPDYKFDDADAWKELTLSDNWTNEEFDLSSLAGKTIYAVKLFFEHEGAVKDYQFNLGQLTISDNHQEPQSPTSFSVVKQSLKNAQEAEAVVQFKGNKDADFYEVYEKDGDSWKLLTGSSSTTIYLPKVSRSASAQGTTQELKVVAVGKNGVRSEAATTTFDWGMTVKDTSLPKPLAENIVPGATVIDSTFPKTEGGEGIEGMLNGTITSLSDKWSSAQLSGSVDIRLTKPRTVVRWVMDHAGAGGESVNDGLMNTKDFDLYYKDADGEWKLAKEVRGNKAHVTDITLDKPITAQDWRLNVVTSDNGTPWKAIRIYNWKMYEKLDTESVNIPMAKAAARSLGNNKVQVGFADVPAGATITVYDNPNSQTPLATLKSEVGGDLASAPLDLTNQSGLLYYRTQLPGKEISNVLAVSVPKDDRRIKSVSLETGPKKTSYAEGEDLDLRGGVLRVQYEGGTEDELIRLTHAGVSVSGFDTHHKGEQNLTLQYLGQPVNANLSVTVTGQDEASPKTILGIEVSQEPKKDYLVGDSLDLSEGRFAVAYSNDTMEEHSFTDEGVEISGYDAQKTGRQTLTLHYQGHEVSFDVLVSPKAALNDEYLKQKLAEVEAAKNKVVYNFASSEVKEAFLKAIEAAEQVLKDHETSTQDQVNDRLNKLTEAHKALNGQEKFKEEKTELDRLTGEVQELLAAKPNHPSGSALAPLLEKNKALVEKVDLSPEELATAKQSLKDLVALLKEDKPAVFSDSKTGVEVHFSNKEKTVIKGLKVERVQASAEEKKYFAGEDAHVFEIEGLDEKGQDVDLSYASIVKIPIEKDKKVKKVFFLPEGKEAVELTFEQTDSHVIFTAPHFTHYAFVYESAEKPQPAKPAPQNKVLPKPTYQPASDQQKAPKLEVQEEKVAFHRQEHENAEMLVGEQRVIIQGRDGLLRHVFEVDENGQRRLRSTEVIQEAIPEIVEIGTKVKTVPAVVATQEKPAQNTAVKSEEASKQLPNTGTADANEALIAGLASLGLASLALTLRRKREDKD

SEQ ID NO: 55 - protein, 1659 aa, Streptococcus pneumoniae Pj-102-163
MKNPFFERRCRYSIRKLSVGACSLMIGAVLFAGPALAEETAVPENSRANTELVSGESEHSTNEADKQNEGEHARENKLEKAEGVATASETASPASNEAATTETAEAASAAKPEEKASEVVAETPSAEAKPKSDKETEAKPEATNQGDESKPAEEANKTEKEVQPDVPKNTEKTLKPKEIKFNSWEELLKWEPGAREDDAINRGSVVLASRRTGHLVNEKASKEAKVQALSNTNSKAKDHASVGGEEFKAYAFDYWQYLDSMVFWEGLVPTPDVIDAGHRNGVPVYGTLFFNWSNSIADQERFAEALKQDADGSFPIARKLVDMAKYYGYDGYFINQETTGDLVKPLGEKMRQFMLYSKEYAAKVNHPIKYSWYDAMTYNYGRYHQDGLGEYNYQFMQPEGDKVPADNFFANFNWDKAKNDYTIATANWIGRNPYDVFAGLELQQGGSYKTKVKWNDILDENGKLRLSLGLFAPDTITSLGKTGEDYHKNEDIFFTGYQGDPTGQKPGDKDWYGIANLVADRTPAVGNTFTTSFNTGHGKKWFVDGKVSKDSEWNYRSVSGVLPTWRWWQTSTGEKLRAEYDFTDAYNGGNSLKFSGDVAGKTDQDVRLYSTKLEVTEKTKLRVAHKGGKGSKVYMAFSTTPDYKFDDADAWKELTLSDNWTNEEFDLSSLAGKTIYAVKLFFEHEGAVKDYQFNLGQLTISDNHQEPQSPTSFSVVKQSLKNAQEAEAVVQFKGNKDADFYEVYEKDGDSWKLLTGSSSTTIYLPKVSRSASAQGTTQELKVVAVGKNGVRSEAATTTFDWGMTVKDTSLPKPLAENIVPGATVIDSTFPKTEGGEGIEGMLNGTITSLSDKWSSAQLSGSVDIRLTKPRTVVRWVMDHAGAGGESVNDGLMNTKDFDLYYKDADGEWKLAKEVRGNKAHVTDITLDKPITAQDWRLNVVTSDNGTPWKAIRIYNWKMYEKLDTESVNIPMAKAAARSLGNNKVQVGFADVPAGATITVYDNPNSQTPLATLKSEVGGDLASAPLDLTNQSGLLYYRTQLPGKEISNVLAVSVPKDDRRIKSVSLETGPKKTSYAEGEDLDLRGGVLRVQYEGGTEDELIRLTHAGVSVSGFDTHHKGEQNLTLQYLGQPVNANLSVTVTGQDEASPKTILGIEVSQEPKKDYLVGDSLDLSEGRFAVAYSNDTMEEHSFTDEGVEISGYDAQKTGRQTLTLRYQGHEVNFDVLVSPKAALNDEYLKQKLAEVEAAKNKVVYNFASPEVKEAFLKAIEAAEQVLKDHETSTQDQVNDRLNKLTEAHKALNGQEKFKEEKTELDRLTGEVQELLAAKPNHPSGSALAPLLEKNKALVEKVDLSPEELATAKQSLKDLVALLKEDKSAVFSDSKTGVEVHFSNKEKSVIKGLKVERVQASAEEKKYFAGEDAHVFEIEGLDEKGQDVDLSYASIVKIPIEKDKKVKKVFFLPEGKEAVELAFEQTDSHVIFTAPHFTHYAFVYESAEKPQPAKPAPQNTVLPKPTYQPASDQQKAPKLEVQEEKVAFHRQEHENAEMLVGEQRVIIQGRDGLLRHVFEVDENGQRRLRSTEVIQEAIPEIVEIGTKVKTVPAVVATQEKPAQNTAVKSEEASKQLPNTGTADANEALIAGLASLGLASLALTLRRKREDKD

SEQ ID NO: 56 - protein, 1659 aa, Streptococcus pneumoniae Pj-102-174
MKNPFFERRCRYSIRKLSVGACSLMIGAVLFAGPALAEETAVPENSGANTELVSGESEHSTNEADKQNEGEHARENKLEKAEGVAIASETASPASNEAATTETAEAASAAKPEEKASEVVAETPSAEAKPKSDKETEAKPEATNQGDESKPAAEANKTEKEVQPDVPKNTEKTLKPKEIKFNSWEELLKWEPGAREDDAINRGSVVLASRRTGHLVNEKASKEAKVQALSNTNSKAKDHASVGGEEFKAYAFDYWQYLDSMVFWEGLVPTPDVIDAGHRNGVPVYGTLFFNWSNSIADQERFAEALKQDADGSFPIARKLVDMAKYYGYDGYFINQETTGDLVKPLGEKMRQFMLYSKEYAAKVNHPIKYSWYDAMTYNYGRYHQDGLGEYNYQFMQPEGDKVPADNFFANFNWDKAKNDYTIATANWIGRNPYDVFAGLELQQGGSYKTKVKWNDILDENGKLRLSLGLFAPDTITSLGKTGEDYHKNEDIFFTGYQGDPTGQKPGDKDWYGIANLVADRTPAVGNTFTTSFNTGHGKKWFVDGKVSKDSEWNYRSVSGVLPTWRWWQTSTGEKLRAEYDFTDAYNGGNSLKFSGDVAGKTDQDVRLYSTKLEVTEKTKLRVAHKGGKGSKVYMAFSTTPDYKFDDADAWKELTLSDNWTNEEFDLSSLAGKTIYAVKLFFEHEGAVKDYQFNLGQLTISDNHQEPQSPTSFSVVKQSLKNAQEAEAVVQFKGNKDADFYEVYEKDGDSWKLLTGSSSTTIYLPKVSRSASAQGTTQELKVVAVGKNGVRSEAATTTFDWGMTVKDTSLPKPLAENIVPGATVIDSTFPKTEGGEGIEGMLNGTITSLSDKWSSAQLSGSVDIRLTKPRTVVRWVMDHAGAGGESVNDGLMNTKDFDLYYKDADGEWKLAKEVRGNKAHVTDITLDKPITAQDWRLNVVTSDNGTPWKAIRIYNWKMYEKLDTESVNIPMAKAAARSLGNNKVQVGFADVPAGATITVYDNPNSQTPLATLKSEVGGDLASAPLDLTNQSGLLYYRTQLPGKEISNVLAVSVPKDDRRIKSVSLETGPKKTSYAEGEDLDLRGGVLRVQYEGGTEDELIRLTHAGVSVSGFDTHHKGEQNLTLQYLGQPVNANLSVTVTGQDEASPKTILGIEVSQEPKKDYLVGDSLDLSEGRFAVAYSNDTMEEHSFTDEGVEISGYDAQKTGRQTLTLHYQGHEVSFDVLVSPKAALNDEYLKQKLAEVEAAKNKVVYNFASSEVKEAFLKAIEAAEQVLKDHETSTQDQVNDRLNKLTEAHKALNGQEKFTEEKTELDRLTGEVQELLAAKPNHPSGSALAPLLEKNKALVEKVDLSPEELTTAKQSLKDLVALLKEDKPAVFSDSKTGVEVHFSNKEKSVIKGLKVERVQASAEEKKYFAGEDAHVFEIEGLDEKGQDVDLSYASIVKIPIEKDKKVKKVFFLPEGKEAVELAFEQTDSHVIFTAPHFTHYAFVYESAEKPQPAKPAPQNTVLPKPTYQPTSDQQKAPKLEVQEEKVAFHRQEHENTEMLVGEQRVIIQGRDGLLRHVFEVDENGQRRLRSTEVIQEAIPEIVEIGTKVKTVPAVVATQEKPAQNTAVKSEEASKQLPNTGTADANEALIAGLASLGLASLALTLRRKREDKD

SEQ ID NO: 57 - protein, 1659 aa, Streptococcus pneumoniae Pj-102-228
MKNPFFERRCRYSIRKLSVGACSLMIGAVLFAGPALAEETAVPENSGANTELVSGESEHSTNEADKQNEGEHARENKLEKAEGVAIASETASPASNEAATTETAEAASAAKPEEKASEVVAETPSAEAKPKSDKETEAKPEATNQGDESKPAAEANKTEKEVQPDVPKNTEKTLKPKEIKFNSWEELLKWEPGAREDDAINRGSVVLASRRTGHLVNEKASKEAKVQALSNTNSKAKDHASVGGEEFKAYAFDYWQYLDSMVFWEGLVPTPDVIDAGHRNGVPVYGTLFFNWSNSIADQERFAEALKQDADGSFPIARKLVDMAKYYGYDGYFINQETTGDLVKPLGEKMRQFMLYSKEYAAKVNHPIKYSWYDAMTYNYGRYHQDGLGEYNYQFMQPEGDKVPADNFFANFNWDKAKNDYTIATANWIGRNPYDVFAGLELQQGGSYKTKVKWNDILDENGKLRLSLGLFAPDTITSLGKTGEDYHKNEDIFFTGYQGDPTGQKPGDKDWYGIANLVADRTPAVGNTFTTSFNTGHGKKWFVDGKVSKDSEWNYRSVSGVLPTWRWWQTSTGEKLRAEYDFTDAYNGGNSLKFSGDVAGKTDQDVRLYSTKLEVTEKTKLRVAHKGGKGSKVYMAFSTTPDYKFDDADAWKELTLSDNWTNEEFDLSSLAGKTIYAVKLFFEHEGAVKDYQFNLGQLTISDNHQEPQSPTSFSVVKQSLKNAQEAEAVVQFKGNKDADFYEVYEKDGDSWKLLTGSSSTTIYLPKVSRSASAQGTTQELKVVAVGKNGVRSEAATTTFDWGMTVKDTSLPKPLAENIVPGATVIDSTFPKTEGGEGIEGMLNGTITSLSDKWSSAQLSGSVDIRLTKPRTVVRWVMDHAGAGGESVNDGLMNTKDFDLYYKDADGEWKLAKEVRGNKAHVTDITLDKPITAQDWRLNVVTSDNGTPWKAIRIYNWKMYEKLDTESVNIPMAKAAARSLGNNKVQVGFADVPAGATITVYDNPNSQTPLATLKSEVGGDLASAPLDLTNQSGLLYYRTQLPGKEISNVLAVSVPKDDRRIKSVSLETGPKKTSYAEGEDLDLRGGVLRVQYEGGTEDELIRLTHAGVSVSGFDTHHKGEQNLTLQYLGQPVNANLSVTVTGQDEASPKTILGIEVSQEPKKDYLVGDSLDLSEGRFAVAYSNDTMEEHSFTDEGVEISGYDAQKTGRQTLTLRYQGHEVNFDVLVSPKAALNDEYLKQKLAEVEAAKNKVVYNFASPEVKEAFLKAIEAAEQVLKDHETSTQDQVNDRLNKLTEAHKALNGQEKFTEEKTELDRLTGEVQELLAAKPNHPSGSALAPLLEKNKALVEKVDLSPEELTTTKQSLKDLVALLKEDKPAVFSDSKTGVEVHFSNKEKTVIKGLKVERVQASAEEKKYFAGEDAHVFEIEGLDEKGQDVDLSYASIVKIPIEKDKKVKKVFFLPEGKEAVELAFEQTDSHVIFTAPHFTHYAFVYESAEKPQPAKPAPQNTVLPKPTYQPASDQQKAPKLEVQEEKVAFHRQEHENTEMLVGEQRVIIQGRDGLLRHVFEVDENGQRRLRSTEVIQEAIPEIVEIGTKVKTVPAVVATQEKPAQNTAVKSEEASKQLPNTGTADANEALIAGLASLGLASLALTLRRKREDKD

SEQ ID NO: 58 - protein, 1659 aa, Streptococcus pneumoniae Pj-102-386; identical to SEQ ID NO: 51

SEQ ID NO: 59 - protein, 1659 aa, Streptococcus pneumoniae Pj-102-468
MKNPFFERRCRYSIRKLSVGACSLMIGAVLFAGPALAEETAVPENSGANTELVSGESEHSTNEADKQNEGEHARENKLEKAEGVAIASETASPASNEAATTETAEAASAAKPEEKASEVVAETPSAEAKPKSDKETEAKPEATNQGDESKPAEEANKTEKEVQPDVPKNTEKTLKPKEIKFNSWEELLKWEPGAREDDAINRGSVVLASRRTGHLVNEKASKEAKVQALSNTNSKAKDHASVGGEEFKAYAFDYWQYLDSMVFWEGLVPTPDVIDAGHRNGVPVYGTLFFNWSNSIADQERFAEALKQDADGSFPIARKLVDMAKYYGYDGYFINQETTGDLVKPLGEKMRQFMLYSKEYAAKVNHPIKYSWYDAMTYNYGRYHQDGLGEYNYQFMQPEGDKVPADNFFANFNWDKAKNDYTIATANWIGRNPYDVFAGLELQQGGSYKTKVKWNDILDENGKLRLSLGLFAPDTITSLGKTGEDYHKNEDIFFTGYQGDPTGQKPGDKDWYGIANLVADRTPAVGNTFTTSFNTGHGKKWFVDGKVSKDSEWNYRSVSGVLPTWRWWQTSTGEKLRAEYDFTDAYNGGNSLKFSGDVAGKTDQDVRLYSTKLEVTEKTKLRVAHKGGKGSKVYMAFSTTPDYKFDDADAWKELTLSDNWTNEEFDLSSLAGKTIYAVKLFFEHEGAVKDYQFNLGQLTISDNHQEPQSPTSFSVVKQSLKNAQEAEAVVQFKGNKDADFYEVYEKDGDSWKLLTGSSSTTIYLPKVSRSASAQGTTQELKVVAVGKNGVRSEAATTTFDWGMTVKDTSLPKPLAENIVPGATVIDSTFPKTEGGEGIEGMLNGTITSLSDKWSSAQLSGSVDIRLTKSRTVVRWVMDHAGAGGESVNDGLMNTKDFDLYYKDADGEWKLAKEVRGNKAHVTDITLDKPITAQDWRLNVVTSDNGTPWKAIRIYNWKMYEKLDTESVNIPMAKAAARSLGNNKVQVGFADVPAGATITVYDNPNSQTPLATLKSEVGGDLASAPLDLTNQSGLLYYRTQLPGKEISNVLAVSVPKDDRRIKSVSLETGPKKTSYAEGEDLDLRGGVLRVQYEGGTEDELIRLTHAGVSVSGFDTHHKGEQNLTLQYLGQPVNANLSVTVTGQDEASPKTILGIEVSQEPKKDYLVGDSLDLSEGRFAVAYSNDTMEEHSFTDEGVEISGYDAQKTGRQTLTLRYQGHEVNFDVLVSPKAALNDEYLKQKLAEVEAAKNKVVYNFASPEVKEAFLKAIEAAEQVLKDHETSTQDQVNDRLNKLTEAHKALNGQEKFTEEKTELDRLTGEAQELLAAKPNHPSGSALAPLLEKNKALVEKVDLSPEELATAKQSLKDLVALLKEDKSAVFSDSKTGVEVHFSNKEKTVIKGLKVERVQASAEEKKYFAGEDAHVFEIEGLDEKGQDVDLSYASIVKIPIEKDKKVKKVFFLPEGKEAVELAFEQTDSHVIFTAPHFTHYAFVYESAEKPQPAKPAPQNTVLPKPTYQPASDQQKAPKLEVQEEKVAFHRQEHENAEMLVGEQRVIIQGRDGLLRHVFEVDENGQRRLRSTEVIQEAIPEIVEIGTKVKTVPAVVATQEKPAQNTAVKSEEASKQLPNTGTADANEALIAGLASLGLASLALTLRRKREDKD

SEQ ID NO: 60 - protein, 1659 aa, Streptococcus pneumoniae Pj-1344
MKNPFFERRCRYSIRKLSVGACSLMIGAVLFAGPALAEETAVPENSGANTELVSGESEHSTNEADKQNEGEHARENKLEKAEGVAIASETASPASNEAATTETAEAASAAKPEEKASEVVAETPSAEAKPKSDKETEAKPEATNQGDESKPAAEANKTEKEVQPDVPKNTEKTLKPKEIKFNSWEELLKWEPGAREDDAINRGSVVLASRRTGHLVNEKASKEAKVQALSNTNSKAKDHASVGGEEFKAYAFDYWQYLDSMVFWEGLVPTPDVIDAGHRNGVPVYGTLFFNWSNSIADQERFAEALKQDADGSFPIARKLVDMAKYYGYDGYFINQETTGDLVKPLGEKMRQFMLYSKEYAAKVNHPIKYSWYDAMTYNYGRYHQDGLGEYNYQFMQPEGDKVPADNFFANFNWDKAKNDYTIATANWIGRNPYDVFAGLELQQGGSYKTKVKWNDILDENGKLRLSLGLFAPDTITSLGKTGEDYHKNEDIFFTGYQGDPTGQKPGDKDWYGIANLVADRTPAVGNTFTTSFNTGHGKKWFVDGKVSKDSEWNYRSVSGVLPTWRWWQTSTGEKLRAEYDFTDAYNGGNSLKFSGDVAGKTDQDVRLYSTKLEVTEKTKLRVAHKGGKGSKVYMAFSTTPDYKFDDADAWKELTLSDNWTNEEFDLSSLAGKTIYAVKLFFEHEGAVKDYQFNLGQLTISDNHQEPQSPTSFSVVKQSLKNAQEAEAVVQFKGNKDADFYEVYEKDGDSWKLLTGSSSTTIYLPKVSRSASAQGTTQELKVVAVGKNGVRSEAATTTFDWGMTVKDTSLPKPLAENIVPGATVIDSTFPKTEGGEGIEGMLNGTITSLSDKWSSAQLSGSVDIRLTKPRTVVRWVMDHAGAGGESVNDGLMNTKDFDLYYKDADGEWKLAKEVRGNKAHVTDITLDKPITAQDWRLNVVTSDNGTPWKAIRIYNWKMYEKLDTESVNIPMAKAAARSLGNNKVQVGFADVPAGATITVYDNPNSQTPLATLKSEVGGDLASAPLDLTNQSGLLYYRTQLPGKEISNVLAVSVPKDDRRIKSVSLETGPKKTSYAEGEDLDLRGGVLRVQYEGGTEDELIRLTHAGVSVSGFDTHHKGEQNLTLQYLGQPVNANLSVTVTGQDEASPKTILGIEVSQEPKKDYLVGDSLDLSEGRFAVAYSNDTMEEHSFTDEGVEISGYDAQKTGRQTLTLRYQGHEVNFDVLVSPKAALNDEYLKQKLAEVEAAKNKVVYNFASPEVKEAFLKAIEAAEQVLKDHETSTQDQVNDRLNKLTEAHKALNGQEKFKEEKTELDRLTGEVQELLAAKPNHPSGSALAPLLEKNKALVEKVDLSPEELATAKQSLKDLVALLKEDKPAVFSDSKTGVEVHFSNKEKTVIKGLKVERVQASAEEKKYFAGEDAHVFEIEGLDEKGQDVDLSYASIVKIPIEKDKKVKKVFFLPEGKEAVELAFEQTDSHVIFTAPHFTHYAFVYESAEKPQPAKPAPQNKVLPKPTYQPASDQQKAPKLEVQEEKVAFHRQEHENAEMLVGEQRVIIQGRDGLLRHVFEVDENGQRRLRSTEVIQEAIPEIVEIGTKVKTVPAVVATQEKPAQNTAVKSEEASKQLPNTGTADANEALIAVLASLGLASLALTLRRKREDKD

SEQ ID NO: 61 - protein, 1646 aa, Streptococcus pneumoniae Pj-1364
MKNPFFERRCRYSIRKLSVGACSLMIGAVLFVGPALAEETAVPENSGANTELVSGESEHSTNEADKQNEGEHTRENKLEKAEGVATASETAEAASAAKPEEKAGEVVAETPSAEAKPKSDKETEAKPEATNQGDESKPAAEANKTEKEVQPDVPKNTEKTLKPKEIKFNSWEELLKWEPGAREDDAINRGSVVLASRRTGHLVNEKASKEAKVQALSNTNSKAKDHASVGGEEFKAYAFDYWQYLDSMVFWEGLVPTPDVIDAGHRNGVPVYGTLFFNWSNSIADQERFAEALKQDADGSFPIARKLVDMVKYYGYDGYFINQETTGDLVKPLGEKMRQFMLYSKEYAAKVNHPIKYSWYDAMTYNYGRYHQDGLGEYNYQFMQPEGDKVPADNFFANFNWDKAKNDYTIATANWIGRNPYDVFAGLELQQGGSYKTKVKWNDILDENGKLRLSLGLFAPDTITSLGKTGEDYHKNEDIFFTGYQGDPTGQKPGDKDWYGIANLVADRTPAVGNTFTTSFNTGHGKKWFVDGKVSKDSEWNYRSVSGVLPTWRWWQTSTGEKLRAEYDFTDAYNGGNSLKFSGDVAGKTDQDVRLYSTKLEVTEKTKLRVAHKGGKGSKVYMAFSTTPDYKFDDADAWKELTLSDNWTNEEFALSSLAGKTIYAVKLFFEHEGAVKDYQFNLGQLTISDNHQEPQSPTSFSVVKQSLKNAQEAEAVVQFKGNKDADFYEVYEKDGDSWKLLTGSSSTTIYLPKVSRSASAQGTTQELKVVAVGKNGVRSEAATTTFDWGMTVKDTSLPKPLAENIVPGATVIDSTFPKTEGGEGIEGMLNGTITSLSDKWSSAQLSGSVDIRLTKPRTVVRWVMDHAGAGGESVNDGLMNTKDFDLYYKDADGEWKLAKEVRGNKAHVTDVTLDKPITAQDWRLNVVTSDNGTPWKAIRIYNWKMYEKLDTESVNIPMAKAAARSLGNNKVQVGFADVPAGATITVYDNPNSPTPLATLKSEVGGDLASAPLDLTNQSGLLYYRTQLPGKEISNVLAVSVPKDDRRIKSVSLETGPKKTSYAEGEDLDLRGGVLRVQYEGGTEDELIRLTHAGVSVSGFDTHHKGEQNLTLQYLGQPVNANLSVTVTGQDEASPKTILGIEVSQEPKKDYLVGDSLDLSEGRFAVAYSNDTMEEHSFTDEGVEISGYDAQKTGRQTLTLRYQGHEVNFDVLVSPKAALNDEYLKQKLAEVEAAKNKVVYNFASPEVKEAFLKAIEAAEQVLKDHETSTQDQVNDRLNKLTEAHKALNGQEKFTEEKTELDRLTGEAQELLAAKPNHPSGSALAPLLEKNKALVEKVDLSPEELTTAKQSLKDLVALLKEDKPAVFSDSKTGVEVHFSNKEKTVIKGLKVERVQASAEEKKYFAGEDAHVFEIEGLDEKGQDVDLSYASIVKIPIEKDKKVKKVFFLPEGKEAVELAFEQTDSHVIFTAPHFTHYAFVYESAEKPQPAKPAPQNKVLPKPTYQPASDQQKAPKLEVQEEKVAFHRQEHENAEMLVGEQRVIIQGRDGLLRHVFEVDENGQRRLRSTEVIQEAIPEIVEIGTKVKTVPAVVATQEKPAQNTAVKSEEASKQLPNTGTADANEALIAGLASLGLASLALILRRKREDED

SEQ ID NO: 62 - protein, 1646 aa, Streptococcus pneumoniae Pj-1484
MKNPFFERRCRYSIRKLSVGACSLMIGAVLFAGPALAEETAVPENSGANTELVSGESEHSTNEADKQNEGEHTRENKLEKAEGVATASETAEAASAAKPEEKAGEVVAETPSAEAKPKSDKETEAKPEATNQGDESKPAAEANKTEKEVQPDVPKNTEKTLKPKEIKFNSWEELLKWEPGAREDDAINRGSVVLASRRTGHLVNEKASKEAKVQALSNTNSKAKDHASVGGEEFKAYAFDYWQYLDSMVFWEGLVPTPDVIDAGHRNGVPVYGTLFFNWSNSIADQERFAEALKQDADGSFPIARKLVDMAKYYGYDGYFINQETTGDLVKPLGEKMRQFMLYSKEYAAKVNHPIKYSWYDAMTYNYGRYHQDGLGEYNYQFMQPEGDKVPADNFFANFNWDKAKNDYTIATANWIGRNPYDVFAGLELQQGGSYKTKVKWNDILDENGKLRLSLGLFAPDTITSLGKTGEDYHKNEDIFFTGYQGDPTGQKPGDKDWYGIANLVADRTPAVGNTFTTSFNTGHGKKWFVDGKVSKDSEWNYRSVSGVLPTWRWWQTSTGEKLRAEYDFTDAYNGGNSLKFSGDVAGKTDQDVRLYSTKLEVTEKTKLRVAHKGGKGSKVYMAFSTTPDYKFDDADAWKELTLSDNWTNEEFALSSLAGKTIYAVKLFFEHEGAVKDYQFNLGQLTISDNHQEPQSPTSFSVVKQSLKNAQEAEAVVQFKGNKDADFYEVYEKDGDSWKLLTGSSSTTIYLPKVSRSASAQGTTQELKVVAVGKNGVRSEAATTTFDWGMTVKDTSLPKPLAENIVPGATVIDSTFPKTEGGEGIEGMLNGTITSLSDKWSSAQLSGSVDIRLTKPRTVVRWVMDHAGAGGESVNDGLMNTKDFDLYYKDADGEWKLAKEVRGNKAHVTDVTLDKPITAQDWRLNVVTSDNGTPWKAIRIYNWKMYEKLDTESVNIPMAKAAARSLGNNKVQVGFADVPAGATITVYDNPNSPTPLATLKSEVGGDLASAPLDLTNQSGLLYYRTQLPGKEISNVLAVSVPKDDRRIKSVSLETGPKKTSYAEGEDLDLRGGVLRVQYEGGTEDELIRLTHAGVSVSGFDTHHKGEQNLTLQYLGQPVNANLSVTVTGQDEASPKTILGIEVSQEPKKDYLVGDSLDLSEGRFAVAYSNDTMEEHSFTDEGVEISGYDAQKTGRQTLTLRYQGHEVNFDVLVSPKAALNDEYLKQKLAEVEAAKNKVVYNFASPEVKEAFLKAIEAAEQVLKDHETSTQDQVNDRLNKLTEAHKALNGQEKFTEEKTELDRLTGEAQELLAAKPNHPSGSALAPLLEKNKALVEKVDLSPEELTTAKQSLKDLVALLKEDKPAVFSDSKTGVEVHFSNKEKTVIKGLKVERVQASAEEKKYFAGEDAHVFEIEGLDEKGQDVDLSYASIVKIPIEKDKKVKKVFFLPEGKEAVELAFEQTDSHVIFTAPHFTHYAFVYESAEKPQPAKPAPQNKVLPKPTYQPASDQQKAPKLEVQEEKVAFHRQEHENAEMLVGEQRVIIQGRDGLLRHVFEVDENGQRRLRSTEVIQEAIPEIVEIGTKVKTVPAVVATQEKPAQNTAVKSEEASKQLPNTGTADANEALIAGLASLGLASLALILRRKREDED

SEQ ID NO: 63 - protein, 1659 aa, Streptococcus pneumoniae Pj-1490
MKNPFFERRCRYSIRKLSVGACSLMIGAVLFAGPALAEETAVPENSGANTELVSGESEHSTNEADKQNEGEHARENKLEKAEGVAIASETASPASNEAATTETAEAASAAKPEEKASEVVAETPSAEAKPKSDKETEAKPEATNQGDESKPAAEANKTEKEVQPDVPKNTEKTLKPKEIKFNSWEELLKWEPGAREDDAINRGSVVLASRRTGHLVNEKASKEAKVQALSNTNSKAKDHASVGGEEFKAYAFDYWQYLDSMVFWEGLVPTPDVIDAGHRNGVPVYGTLFFNWSNSIADQERFAEALKQDADGSFPIARKLVDMAKYYGYDGYFINQETTGDLVKPLGRKMRQFMLYSKEYAAKVNHPIKYSWYDAMTYNYGRYHQDGLGEYNYQFMQPEGDKVPADNFFANFNWDKAKNDYTIATANWIGRNPYDVFAGLELQQGGSYKTKVKWNDILDENGKLRLSLGLFAPDTITSLGKTGEDYHKNEDIFFTGYQGDPTGQKPGDKDWYGIANLVADRTPAVGNTFTTSFNTGHGKKWFVDGKVSKDSEWNYRSVSGVLPTWRWWQTSTGEKLRAEYDFTDAYNGGNSLKFSGDVAGKTDQDVRLYSTKLEVTEKTKLRVAHKGGKGSKVYMAFSTTPDYKFDDADAWKELTLSDNWTNEEFDLSSLAGKTIYAVKLFFEHEGAVKDYQFNLGQLTISDNHQEPQSPTSFSVVKQSLKNAQEAEAVVQFKGNKDADFYEVYEKDGDSWKLLTGSSSTTIYLPKVSRSASAQGTTQELKVVAVGKNGVRSEAATTTFDWGMTVKDTSLPKPLAENIVPGATVIDSTFPKTEGGEGIEGMLNGTITSLSDKWSSAQLSGSVDIRLTKPRTVVRWVMDHAGAGGESVNDGLMNTKDFDLYYKDADGEWKLAKEVRGNKAHVTDITLDKPITAQDWRLNVVTSDNGTPWKAIRIYNWKMYEKLDTESVNIPMAKAAARSLGNNKVQVGFADVPAGATITVYDNPNSQTPLATLKSEVGGDLASAPLDLTNQSGLLYYRTQLPGKEISNVLAVSVPKDDRRIKSVSLETGPKKTSYAEGEDLDLRGGVLRVQYEGGTEDELIRLTHAGVSVSGFDTHHKGEQNLTLQYLGQPVNANLSVTVTGQDEASPKTILGIEVSQEPKKDYLVGDSLDLSEGRFAVAYSNDTMEEHSFTDEGVEISGYDAQKTGRQTLTLRYQGHEVNFDVLVSPKAALNDEYLKQKLAEVEAAKNKVVYNFASPEVKEAFLKAIEAAEQVLKDHETSTQDQVNDRLNKLTEAHKALNGQEKFKEEKTELDRLTGEVQELLAAKPNHPSGSALAPLLEKNKALVEKVDLSPEELATAKQSLKDLVALLKEDKPAVFSDSKTGVEVHFSNKEKTVIKGLKVERVQASAEEKKYFAGEDAHVFEIEGLDEKGQDVDLSYASIVKIPIEKDKKVKKVFFLPEGKEAVELAFEQTDSHVIFTAPHFTHYAFVYESAEKPQPAKPAPQNKVLPKPTYQPASDQQKAPKLEVQEEKVAFHRQEHENAEMLVGEQRVIIQGRDGLLRHVFEVDENGQRRLRSTEVIQEAIPEIVEIGTKVKTVPAVVATQEKPAQNTAVKSEEASKQLPNTGTADANEALIAVLASLGLASLALTLRRKREDKD

SEQ ID NO: 64 - protein, 1659 aa, Streptococcus pneumoniae Pj-1228
MKNPFFERRCRYSIRKLSVGACSLMIGAVLFAGPALAEETAVPENSGANTELVSGESEHSTNEADKQNEGEHARENKLEKAEGVAIASETASPASNEAATTETAEAASAAKPEEKASEVVAETPSAEAKPKSDKETEAKPEATNQGDESKPAAEANKTEKEVQPDVPKNTEKTLKPKEIKFNSWEELLKWEPGAREDDAINRGSVVLASRRTGHLVNEKASKEAKVQALSNTNSKAKDHASVGGEEFKAYAFDYWQYLDSMVFWEGLVPTPDVIDAGHRNGVPVYGTLFFNWSNSIADQERFAEALKQDADGSFPIARKLVDMAKYYGYDGYFINQETTGDLVKPLGEKMRQFMLYSKEYAAKVNHPIKYSWYDAMTYNYGRYHQDGLGEYNYQFMQPEGDKVPADNFFANFNWDKAKNDYTIATANWIGRNPYDVFAGLELQQGGSYKTKVKWNDILDENGKLRLSLGLFAPDTITSLGKTGEDYHKNEDIFFTGYQGDPTGQKPGDKDWYGIANLVADRTPAVGNTFTTSFNTGHGKKWFVDGKVSKDSEWNYRSVSGVLPTWRWWQTSTGEKLRAEYDFTDAYNGGNSLKFSGDVAGKTDQDVRLYSTKLEVTEKTKLRVAHKGGKGSKVYMAFSTTPDYKFDDADAWKELTLSDNWTNEEFDLSSLAGKTIYAVKLFFEHEGAVKDYQFNLGQLTISDNHQEPQSPTSFSVVKQSLKNAQEAEAVVQFKGNKDADFYEVYEKDGDSWKLLTGSSSTTIYLPKVSRSASAQGTTQELKVVAVGKNGVRSEAATTTFDWGMTVKDTSLPKPLAENIVPGATVIDSTFPKTEGGEGIEGMLNGTITSLSDKWSSAQLSGSVDIRLTKPRTVVRWVMDHAGAGGESVNDGLMNTKDFDLYYKDADGEWKLAKEVRGNKAHVTDITLDKPITAQDWRLNVVTSDNGTPWKAIRIYNWKMYEKLDTESVNIPMAKAAARSLGNNKVQVGFADVPAGATITVYDNPNSQTPLATLKSEVGGDLASAPLDLTNQSGLLYYRTQLPGKEISNVLAVSVPKDDRRIKSVSLETGPKKTSYAEGEDLDLRGGVLRVQYEGGTEDELIRLTHAGVSVSGFDTHHKGEQNLTLQYLGQPVNANLSVTVTGQDEASPKTILGIEVSQEPKKDYLVGDSLDLSEGRFAVAYSNDTMEEHSFTDEGVEISGYDAQKTGRQTLTLHYQGHEVSFDVLVSPKAALNDEYLKQKLAEVEAAKNKVVYNFASSEVKEAFLKAIEAAEQVLKDHETSTQDQVNDRLNKLTEAHKALNGQEKFTEEKTELDRLTGEVQELLAAKPNHPSGSALAPLLEKNKALVEKVDLSPEELTTAKQSLKDLVALLKEDKPAVFSDSKTGVEVHFSNKEKTVIKGLKVERVQASAEEKKYFAGEDAHVFEIEGLDEKGQDVDLSYASIVKIPIEKDKKVKKVFFLPEGKEAVELAFEQTDSHVIFTAPHFTHYAFVYESAEKPQPAKPAPQNTVLPKPTYQPTSDQQKAPKLEVQEEKVAFHRQEHENAEMLVGEQRVIIQGRDGLLRHVFEVDENGQRRLRSTEVIQEAIPEIVEIGTKVKTVPAVVATQEKPAQNTAVKSEEASKQLPNTGTADANEALIAGLASLGLASLALTLRRKREDKD

SEQ ID NO: 65 - protein, 1646 aa, Streptococcus pneumoniae Pj-1229
MKNPFFERRCRYSIRKLSVGACSLMIGAVLFAGPALAEETAVPENSGANTELVSGESEHSTNEADKQNEGEHARENKLEKAEGVATASETAEAASAAKPEEKVGEVVAETPSAEAKPKSDKETEAKPEATNQGDESKPAEEANKTEKEVQPDVPKNTEKTLKPKEIKFNSWEELLKWEPGAREDDAINRGSVVLASRRTGHLVNEKASKEAKVQALSNTNSKAKDHASVGGEEFKAYAFDYWQYLDSMVFWEGLVPTPDVIDAGHRNGVPVYGTLFFNWSNSIADQERFAEALKQDADGSFPIARKLVDMAKYYGYDGYFINQETTGDLVKPLGEKMRQFMLYSKEYAAKVNHPIKYSWYDAMTYNYGRYHQDGLGEYNYQFMQPEGDKVPADNFFANFNWDKAKNDYTIATANWIGRNPYDVFAGLELQQGGSYKTKVKWNDILDENGKLRLSLGLFAPDTITSLGKTGEDYHKNEDIFFTGYQGDPTGQKPGDKDWYGIANLVADRTPAVGNTFTTSFNTGHGKKWFVDGKVSKDSEWNYRSVSGVLPTWRWWQTSTGEKLRAEYDFTDAYNGGNSLKFSGDVAGKTVQDVRLYSTKLEVTEKTKLRVAHKGGKGSKVYMAFSTTSDYKFDDADAWKELTLSDNWTNEEFDLSSLAGKTIYAVKLFFEHEGAVKDYQFNLGQLTISDNHQEPQSPTSFSVVKQSLKNAQEAEAVVQFKGNKDADFYEVYEKDGDSWKLLTGSSSTTIYLPKVSRSASAQGTTQELKVVAVGKNGVRSEAATTTFDWGMTVKDTSLPKPLAENIVPGATVIDSTFPKTEGGEGIEGMLNGTITSLSDKWSSAQLSGSVDIRLTKPRTVVRWVMDHAGAGGESVNDGLMNTKDFDLYYKDADGEWKLAKEVRGNKAHVTDITLDKPITAQDWRLNVVTSDNGTPWKAIRIYNWKMYEKLDTESVNIPMAKAAARSLGNNKVQVGFSDVPAGATITVYDNPNSQTPLATLKSEVGGDLASAPLDLTNQSGLLYYRTQLPGKEISNVLAVSVPKDDRRIKSVSLETGPKKTSYAEGEDLDLRGGVLRVQYEGGTEDELIRLTHAGVSVSGFDTHHKGEQNLTLQYLGQPVNANLSVTVTGQDEASPKTILGIEVSQEPKKDYLVGDSLDLSEGRFAVAYSNDTMEEHSFTDEGVEISGYDAQKTGRQTLTLHYQGHEVSFDVLVSPKAALNDEYLKQKLAEVEAAKNKVVYNFASSEVKEAFLKAIEAAEQVLKDHETSTQDQVNDRLNKLTEAHKALNGQEKFTEEKTELDRLTGEVQELLAAKPNHPSGSALAPLLEKNKALVEKVDLSPEELTTAKQSLKDLVALLKEDKPAVFSDSKTGVEVHFSNKEKTVIKGLKVERVQASAEEKKYFAGEDAHVFEIEGLDEKGQDVDLSYASIVKIPIEKDKKVKKVFFLPEGKEAVELAFEQTDSHVIFTAPHFTHYAFVYESAEKPQPAKPAPQNTVLPKPTYQPASDQQKAPKLEVQEEKVAFHRQEHENAEMLVGEQRVIIQGRDGLLRHVFEVDENGQRRLRSTEVIQEAIPEIVEIGTKVKTVPAVVATQEKPAQNTAVKSEEASKQLPNTGTADANEALIAGLASLGLASLALTLRRKREDKD

SEQ ID NO: 66 - protein, 1659 aa, Streptococcus pneumoniae Pj-1230
MKNPFFERRCRYSIRKLSVGACSLMIGAVLFAGPALAEETAVPENSGANTELVSGESEHSTNEADKQNEGEHARENKLEKAEAVATASETASPASNEAATTETAEAASAAKPEEKAGEVVAETPSAEAKPKSDKETEAKPEATNQGDESKPAAEANKTEKEVQPDVPKNTEKTLKPKEIKFNSWEELLKWEPGAREDDAINRGSVVLASRRTGHLVNEKASKEAKVQALSNTNSKAKDHASVGGEEFKAYAFDYWQYLDSMVFWEGLVPTPDVIDAGHRNGVPVYGTLFFNWSNSIADQERFAEALKQDADGSFPIARKLVDMAKYYGYDGYFINQETTGDLVKPLGEKMRQFMLYSKEYAAKVNHPIKYSWYDAMTYNYGRYHQDGLGEYNYQFMQPEGDKVPADNFFANFNWDKAKNDYTIATANWIGRNPYDVFAGLELQQGGSYKTKVKWNDILDENGKLRLSLGLFAPDTITSLGKTGEDYHKNEDIFFTGYQGDPTGQKPGDKDWYGIANLVADRTPAVGNTFTTSFNTGHGKKWFVDGKVSKDSEWNYRSVSGVLPTWRWWQTSTGEKLRAEYDFTDAYNGGNSLKFSGDVAGKTDQDVRLYSTKLEVTEKTKLRVAHKGGKGSKVYMAFSTTPDYKFDDADAWKELTLSDNWTNEEFDLSSLAGKTIYAVKLFFEHEGAVKDYQFNLGQLTISDNHQEPQSPTSFSVVKQSLKNAQEAEAVVQFKGNKDADFYEVYEKDGDSWKLLTGSSSTTIYLPKVSRSASAQGTTQELKVVAVGKNGVRSEAATTTFEWGMTVQDTSLPRPLAENIVPGATVIGSTFPDTEGGEGIEGMLNGTITSLSDKWSSAQLSGSVDIRLTKPRTVVRWVMDHAGAGGESVNDGLMNTKDFDLYYKDADGEWKLAKEVRGNKAHVTDITLDKPITAQDWRLNVVTSDNGTPWKAIRIYNWKMYEKLDTESVNIPMAKAAARSLGNNKVQVGFADVPAGATITVYDNPNSQTPLATLKSEVGGDLASAPLDLTNQSGLLYYRTQLPGKEISNVLAVSVPKDDRRIKSVSLETGPKKTSYAEGEDLDLRGGVLRVQYEGGTEDELIRLTHAGVSVSGFDTHHKGEQNLTLQYLGQPVNANLSVTVTGQDEASPKTILGIEVSQEPKKDYLVGDSLDLSEGRFAVAYSNDTMEEHSFTDEGVEISGYDAQKTGRQTLTLRYQGHEFNFDVLVSPKAALNDEYLKQKLAEVEAAKNKVVYNFASPEVKEAFLKAIEAAEQVLKDRETSTQDQVNDRLNKLTEAHKALNGQEKFKEEKTELDRLTGEVQELLAAKPNHPSGSALAPLLEKNKALVEKVDLSPEELATAKQSLKDLVALLKEDKPAVFSDSKTGVEVHFSNKEKTVIKGLKVERVQASAEEKKYFAGEDAHVFEIEGLDEKGQDVALSYASIVKIPIEKDKKVKKVFFLPEGKEAVELAFEQTDSHVIFTAPHFTHYAFVYESAEKPQPAKPAPQNKVLPKPTYQPASDQQKAPKLEVQEEKVAFHRQDHENAEMLVGEQRVIIQGRDGLLRHVFEVDENGQRRLRSTEVIQEAIPEIVEIGTKVKTVPAVVATQEKPAQNTAVKSEEASKQLPNTGTADANEALIAGLASLGLASLALTLRRKREDKD

SEQ ID NO: 67 - protein, 1646 aa, Streptococcus pneumoniae Pj-1231
MKNPFFERRCRYSIRKLSVGACSLMIGAVLFAGPALAEETAVPENSGANPELVSGESEHSTNEADKQNEGEHARENKLEKAEGVAIASETAEAASAAKPEEKASEVVAETPSAEAKPKSDKETEAKPEATNQGDESKPAAEANKTEKEVQPDVPKNTEKTLKPKEIKFNSWEELLKWEPGAREDDAINRGSVVLASRRTGHLVNEKASKEAKVQALSNTNSKAKDHASVGGEEFKAYAFDYWQYLDSMVFWEGLVPTPDVIDAGHRNGVPVYGTLFFNWSNSIADQERFAEALKQDADGSFPIARKLVDMAKYYGYDGYFINQETTGDLVKPLGEKMRQFMLYSKEYAAKVNHPIKYSWYDAMTYNYGRYHQDGLGEYNYQFMQPEGDKVPADNFFANFNWDKAKNDYTIATANWIGRNPYDVFAGLELQQGGSYKTKVKWNDILDENGKLRLSLGLFAPDTITSLGKTGEDYHKNEDIFFTGYQGDPTGQKPGDKDWYGIANLVADRTPAVGNTFTTSFNTGHGKKWFVDGKVSKDSEWNYRSVSGVLPTWRWWQTSTGEKLRAEYDFTDAYNGGNSLKFSGDVAGKTDQDVRLYSTKLEVTEKTKLRVAHKGGKGSKVYMAFSTTPDYKFDDADAWKELTLSDNWTNEEFALSSLAGKTIYAVKLFFEHEGAVKDYQFNLGQLTISDNHQEPQSPTSFSVVKQSLKNAQEAEAVVQFKGNKDADFYEVYEKDGDSWKLLTGSSSTTIYLPKVSRSASAQGTTQELKVVAVGKNGVRSEAATTTFDWGMTVKDTSLPKPLAENIVPGATVIDSTFPKTEGGEGIEGMLNGTITSLSDKWSSAQLSGSVDIRLTKPRTVVRWVMDHAGAGGESVNDGLMNTKDFDLYYKDADGEWKLAKEVRGNKAHVTDITLDKPITAQDWRLNVVTSDNGTPWKAIRIYNWKMYEKLDTESVNIPMAKAAARSLGNNKVQVGFADVPAGATITVYDNPNSQTPLATLKSEVGGDLASAPLDLTNQSGLLYYRTQLPGKEISNVLAVSVPKDDRRIKSVSLETGPKKTSYAEGEDLDLRGGVLRVQYEGGTEDELIRLTHAGVSVSGFDTHHKGEQNLTLQYLGQPVNANLSVTVTGQDEASPKTILGIEVSQEPKKDYLVGDNLDLSEGRFAVAYSNDTMEEHSFTDEGVEISGYDAQKTGRQTLTLRYQGHEVNFDVLVSPKAALNDEYLKQKLAEVEAAKNKVVYNFASPEVKEAFLKAIEAAEQVLKDHETSTQDQVNDRLNKLTEAHKALNGQEKFTEEKTELDRLTGEAQELLAAKPNHPSGSALAPLLEKNKALVEKVDLSPEELATAKQSLKDLVALLKEDKSAVFSDSKTGVEVHFSNKEKTVIKGLKVERVQASAEEKKYFAGEDAHVFEIEGLDEKGQDVDLSYASIVKIPIEKDKKVKKVFFLPEGKEAVELAFEQTDSHVIFTAPHFTHYAFVYESAEKPQPAKPAPQNKVLPKPTYQPASDQQKAPKLEVQEEKVAFHRQEHENAEMLVGEQRVIIQGRDGLLRHVFEVDENGQRRLRSTEVIQEAIPEIVEIGTKVKTVPAVVATQEKPAQNTAVKSEEASKQLPNTGTADANEALIAGLASLGLASLALTLRRKREDKD

SEQ ID NO: 68 - protein, 1659 aa, Streptococcus pneumoniae Pj-1232
MKNPFFERRCRYSIRKLSVGACSLMIGAVLFAGPALAEETAVPENSGANTELVSGESEHSTNEADKQNEGEHARENKLEKAEGVAIASETASPASNEAATTETAEAASAAKPEEKASEVVAETPSAEAKPKSDKETEAKPEATNQGDESKPAEEANKTEKEVQPDVPKNTEKTLKPKEIKFNSWEELLKWEPGAREDDAINRGSVVLASRRTGHLVNEKASKEAKVQALSNTNSKAKDHASVGGEEFKAYAFDYWQYLDSMVFWEGLVPTPDVIDAGHRNGVPVYGTLFFNWSNSIADQERFAEALKQDADGSFPIARKLVDMAKYYGYDGYFINQETTGDLVKPLGEKMRQFMLYSKEYAAKVNHPIKYSWYDAMTYNYGRYHQDGLGEYNYQFMQPEGDKVPADNFFANFNWDKAKNDYTIATANWIGRNPYDVFAGLELQQGGSYKTKVKWNDILDENGKLRLSLGLFAPDTITSLGKTGEDYHKNEDIFFTGYQGDPTGQKPGDKDWYGIANLVADRTPAVGNTFTTSFNTGHGKKWFVDGKVSKDSEWNYRSVSGVLPTWRWWQTSTGEKLRAEYDFTDAYNGGNSLKFSGDVAGKTDQDVRLYSTKLEVTEKTKLRVAHKGGKGSKVYMAFSTTPDYKFDDADAWKELTLSDNWTNEEFDLSSLAGKTIYAVKLFFEHEGAVKDYQFNLGQLTISDNHQEPQSPTSFSVVKQSLKNAQEAEAVVQFKGNKDADFYEVYEKDGDSWKLLTGSSSTTIYLPKVSRSASAQGTTQELKVVAVGKNGVRSEAATTTFDWGMTVKDTSLPKPLAENIVPGATVIDSTFPKTEGGEGIEGMLNGTITSLSDKWSSAQLSGSVDIRLTKPRTVVRWVMDHAGAGGESVNDGLMNTKDFDLYYKDADGEWKLAKEVRGNKAHVTDITLDKPITAQDWRLNVVTSDNGTPWKAIRIYNWKMYEKLDTESVNIPMAKAAARSLGNNKVQVGFADVPAGATITVYDNPNSQTPLATLKSEVGGDLASAPLDLTNQSGLLYYRTQLPGKEISNVLAVSVPKDDRRIKSVSLETGPKKTSYAEGEDLDLRGGVLRVQYEGGTEDELIRLTHAGVSVSGFDTHHKGEQNLTLQYLGQPVNANLSVTVTGQDEASPKTILGIEVSQEPKKDYLVGDSLDLSEGRFAVAYSNDTMEEHSFTDEGVEISGYDAQKTGRQTLTLRYQGHEVNFDVLVSPKAALNDEYLKQKLAEVEAAKNKVVYNFASPEVKEAFLKAIEAAEQVLKDHETSTQDQVNDRLNKLTEAHKALNGQEKFTEEKTELDRLTGEAQELLAAKPNHPSGSALAPLLEKNKALVEKVDLSPEELATAKQSLKYLVALLKEDKSAVFSDSKTGVEVHFSNKEKTVIKGLKVERVQASAEEKKYFAGEDAHVFEIEGLDEKGQDVDLSYASIVKIPIEKDKKVKKVFFLPEGKEAVELTFEQTDSHVIFTASHFTHYAFVYESAEKPQPAKPAPQNTVLPKPTYQPASDQQKAPKLEVQEEKVAFHRQEHENAEMLVGEQRVIIQGRDGLLRHVFEVDENGQRRLRSTEVIQEAIPEIVEIGTKVKTVPAVVATQEKPAQNTAVKSEEASKQLPNTGTADANEALIAGLASLGLASLALTLRRKREDKD

SEQ ID NO: 69 - protein, 1646 aa, Streptococcus pneumoniae Pj-1233
MKNPFFERRCRYSIRKLSVGACSLMIGAVLFVGPALAEETAVPENSGANTELVSGESEHSTNEADKQNEGEHTRENKLEKAEGVATASETAEAASAAKPEEKAGEVVAETPSAEAKPKSDKETEAKPEATNQGDESKPAAEANKTEKEVQPDVPKNTEKTLKPKEIKFNSWEELLKWEPGAREDDAINRGSVVLASRRTGHLVNEKASKEAKVQALSNTNSKAKDHASVGGEEFKAYAFDYWQYLDSMVFWEGLVPTPDVIDAGHRNGVPVYGTLFFNWSNSIADQERFAEALKQDADGSFPIARKLVDMAKYYGYDGYFINQETTGDLVKPLGEKMRQFMLYSKEYAAKVNHPIKYSWYDAMTYNYGRYHQDGLGEYNYQFMQPEGDKVPADNFFANFNWDKAKNDYTIATANWIGRNPYDVFAGLELQQGGSYKTKVKWNDILDENGKLRLSLGLFAPDTITSLGKTGEDYHKNEDIFFTGYQGDPTGQKPGDKDWYGIANLVADRTPAVGNTFTTSFNTGHGKKWFVDGKVSKDSEWNYRSVSGVLPTWRWWQTSTGEKLRAEYDFTDAYNGGNSLKFSGDVAGKTDQDVRLYSTKLEVTEKTKLRVAHKGGKGSKVYMAFSTTPDYKFDDADAWKELTLSDNWTNEEFALSSLAGKTIYAVKLFFEHEGAVKDYQFNLGQLTISDNHQEPQSPTSFSVVKQSLKNAQEAEAVVQFKGNKDADFYEVYEKDGDSWKLLTGSSSTTIYLPKVSRSASAQGTTQELKVVAVGKNGVRSEAATTTFDWGMTVKDTSLPKPLAENIVPGATVIDSTFPKTEGGEGIEGMLNGTITSLSDKWSSAQLSGSVDIRLTKPRTVVRWVMDHAGAGGESVNDGLMNTKDFDLYYKDADGEWKLAKEVRGNKAHVTDVTLDKPITAQDWRLNVVTSDNGTPWKAIRIYNWKMYEKLDTESVNIPMAKAAARSLGNNKVQVGFADVPAGATITVYDNPNSQTPLATLKSEVGGDLASAPLDLTNQSGLLYYRTQLPGKEISNVLAVSVQKDDRRIKSVSLETGPKKTSYAEGEDLDLRGGVLRVQYEGGTEDELIRLTHAGVSVSGFDTHHKGEQNLTLQYLGQPVNANLSVTVTGQDEASPKTILGIEVSQEPKKDYLVGDSLDLSEGRFAVAYSNDTMEEHSFTDEGVEISGYDAQKTGRQTLTLHYQGHEVNFDVLVSPKAALNDEYLKQKLAEVEAAKNKVVYNFASPEVKEAFLKAIEAAEQVLKDHETSTQDQVNDRLNKLTEAHKALNGQEKFTEEKTELDRLTGEAQELLAAKPNHPSGSALAPLLEKNKALVEKVDLSPEELATAKQSLKDLVALLKEDKPAVFSDSKTGVEVHFSNKEKTVIKGLKVERVQASAEEKKYFAGEDAHVFEIEGLDEKGQDVDLSYASIVKIPIEKDKKVKKVFFLPEGKEAVELAFEQTDSHIIFTAPHFTHYAFVYESAEKPQPAKPAPQNKVLPKPTYQPASDQQKAPKLEVQEEKVAFHRQEHENAEMLVGEQRVIIQGRDGLLRHVFEVDENGQRRLRSTEVIQEAIPEIVEIGTKVKTVPAVVATQEKPAQNTAVKSEEASKQLPNTGTADANEALIAGLASLGLASLALTLRRKREDKD

SEQ ID NO: 70 - protein, 1659 aa, Streptococcus pneumoniae Pj-1234
MKNPFFERRCRYSIRKLSVGACSLMIGAVLFVGPALAEETAVPENSGANTELVSGESEHSTNEADKQNEGEHTRENKLEKAEGVATASETASPASNEAATTETAEAASAAKPEEKAGEVVAETPSAEAKPKSDKETEAKPEATNQGDESKPAAEANKTEKEVQPDVPKNTEKTLKPKEIKFNSWEELLKWEPGAREDDAINRGSVVLASRRTGHLVNEKASKEAKVQALSNTNSKAKDHASVGGEEFKAYAFDYWQYLDSMVFWEGLVPTPDVIDAGHRNGVPVYGTLFFNWSNSIADQERFAEALKQDADGSFPIARKLVDMAKYYGYDGYFINQETTGDLVKPLGEKMRQFMLYSKEYAAKVNHPIKYSWYDAMTYNYGRYHQDGLGEYNYQFMQPEGDKVPADNFFANFNWDKAKNDYTIATANWIGRNPYDVFAGLELQQGGSYKTKVKWNDILDENGKLRLSLGLFAPDTITSLGKTGEDYHKNEDIFFTGYQGDPTGQKPGDKDWYGIANLVADRTPAVGNTFTTSFNTGHGKKWFVDGKVSKDSEWNYRSVSGVLPTWRWWQTSTGEKLRAEYDFTDAYNGGNSLKFSGDVAGKTDQDVRLYSTKLEVTEKTKLRVAHKGGKGSKVYMAFSTTPDYKFDDADAWKELTLSDNWTNEEFALSSLAGKTIYAVKLFFEHEGAVKDYQFNLGQLTISDNHQEPQSPTSFSVVKQSLKNAQEAEAVVQFKGNKDADFYEVYEKDGDSWKLLTGSSSTTIYLPKVSRSASAQGTTQELKVVAVGKNGVRSEAATTTFDWGMTVKDTSLPKPLAENIVPGATVIDSTFPKTEGGEGIEGMLNGTITSLSDKWSSAQLSGSVDIRLTKPRTVVRWVMDHAGAGGESVNDGLMNTKDFDLYYKDADGEWKLAKEVRGNKAHVTDVTLDKPITAQDWRLNVVTSDNGTPWKAIRIYNWKMYEKLDTESVNIPMAKAAARSLGNNKVQVGFADVPAGATITVYDNPNSPTPLATLKSEVGGDLASAPLDLTNQSGLLYYRTQLPGKEISNVLAVSVPKDDRRIKSVSLETGPKKTSYAEGEDLDLRGGVLRVQYEGGTEDELIRLTHAGVSVSGFDTHHKGEQNLTLQYLGQPVNANLSVTVTGQDEASPKTILGIEVSQEPKKDYLVGDSLDLSEGRFAVAYSNDTMEEHSFTDEGVEISGYDAQKTGRQTLTLRYQGHEVNFDVLVSPKAALNDEYLKQKLAEVEAAKNKVVYNFASPEVKEAFLKAIEAAEQVLKDHETSTQDQVNDRLNKLTEAHKALNGQEKFTEEKTELDRLTGEAQELLAAKPNHPSGSALAPLLEKNKALVEKVDLSPEELTTAKQSLKDLVALLKEDKPAVFSDSKTGVEVHFSNKEKTVIKGLKVERVQASAEEKKYFAGEDAHVFEIEGLDEKGQDVDLSYASIVKIPIEKDKKVKKVFFLPEGKEAVELAFEQTDSHVIFTAPHFTHYAFVYESAEKPQPAKPAPQNKVLPKPTYQPASDQQKAPKLEVQEEKVAFHRQEHENAEMLVGEQRVIIQGRDGLLRHVFEVDENGQRRLRSTEVIQEAIPEIVEIGTKVKTVPAVVATQEKPAQNTAVKSEEASKQLPNTGTADANEALIAGLASLGLASLALILRRKREDED

SEQ ID NO: 71 - protein, 1636 aa, Streptococcus pneumoniae Pj-1236
MKNPFFERRCRYSIRKLSVGACSLMIGAVLFAGPALAEETAVPENSGANTELVSGESEHSTNEADKQNEGEHARENKLEKAEAASAAKPEEKAGEVVAETPSAEAKPKSDKETEAKPEATNQGDESKPAAEANKTEKEVQPDVPKNTEKTLKPKEIKFNSWEELLKWEPGAREDDAINRGSVVLASRRTGHLVNEKASKEAKVQALSNTNSKAKDHASVGGEEFKAYAFDYWQYLDSMVFWEGLVPTPDVIDAGHRNGVPVYGTLFFNWSNSIADQERFAEALKQDADGSFPIARKLVDMAKYYGYDGYFINQETTGDLVKPLGEKMRQFMLYSKEYAAKVNHPIKYSWYDAMTYNYGRYHQDGLGEYNYQFMQPEGDKVPADNFFANFNWDKAKNDYTIATANWIGRNPYDVFAGLELQQGGSYKTKVKWNDILDENGKLRLSLGLFAPDTITSLGKTGEDYHKNEDIFFTGYQGDPTGQKPGDKDWYGIANLVADRTPAVGNTFTTSFNTGHGKKWFVDGKVSKDSEWNYRSVSGVLPTWRWWQTSTGEKLRAEYDFTDAYNGGNSLKFSGDVAGKTDQDVRLYSTKLEVTEKTKLRVAHKGGKGSKVYMAFSTTPDYKFDDADAWKELTLSDNWTNEEFDLSSLAGKTIYAVKLFFEHEGAVKDYRFNLGQLTISDNHQEPQSPTSFSVVKQSLKNAQEAEAVVQFKGNKDADFYEVYEKDGDSWKLLTGSSSTTIYLPKVSRSASAQGTTQELKVVAVGKNGVRSEAATTTFEWGMTVQDTSLPRPLAENIVPGATVIGSTFPDTEGGEGIEGMLNGTITSLSDKWSSAQLSGSVDIRLTKPRTVVRWVMDHAGAGGESVNDGLMNTKDFDLYYKDADGEWKLAKEVRGNKAHVTDITLDKPITAQDWRLNVVTSDNGTPWKAIRIYNWKMYEKLDTESVNIPMAKAAARSLGNNKVQVGFADVPAGATITVYDNPNSQTPLATLKSEVGGDLASAPLDLTNQSGLLYYRTQLPGKEISNVLAVSVPKDDRRIKSVSLETGPKKTSYAEGEDLDLRGGVLRVQYEGGTEDELIRLTHAGVSVSGFDTHHKGEQNLTLQYLGQPVNANLSVTVTGQDEASPKTILGIEVSQEPKKDYLVGDSLDLSEGRFAVAYSNDTMEEHSFTDEGVEISGYDAQKTGRQTLTLRYQGHEVNFDVLVSPKAALNDEYLKQKLAEVEAAKNKVVYNFASPEVKEAFLKAIEAAEQVLKDHETSTQDQVNDRLNKLTEAHKALNGQEKFKEEKTELDRLTGEVQELLAAKPNHPSGSALAPLLEKNKALVEKVDLSPEELATAKQSLKDLVALLKEDKPAVFSDSKTGVEVHFSNKEKTVIKGLKVERVQASAEEKKYFAGEDAHVFEIEGWDEKGQDVDLSYASIVKIPIEKDKKVKKVFFLPEGKEAVELAFEQTDSHVIFTAPHFTHYAFVYESAEKPQPAKPAPQNTVLPKPTYQPASDQQKAPKLEVQEEKVAFHRQEHENAEMLVGEQRVIIQGRDGLLRHVFEVDENGQRRLRSTEVIQEAIPEIVEIGTKVKTVPAVVATQEKPAQNTAVKSEEASKQLPNTGTADANEALIAGLASLGLASLALTLRRKREDKD

SEQ ID NO: 72 - protein, 1659 aa, Streptococcus pneumoniae Pj-1237; identical to SEQ ID NO: 50

SEQ ID NO: 73 - protein, 1646 aa, Streptococcus pneumoniae Pj-1241
MKNPFFERRCRYSIRKLSVGACSLMIGAVLFAGPALAEETAVPENSGANTELVSGESEHSTNEADKQNEGEHARENKLEKAEGVATASETAEAASAAKPEEKASEVIAETPSAEAKPKSDKETEAKPEATNQGDESKPAAEANKTEKEVQPDVPKNTEKTLKPKEIKFNSWEELLKWEPGAREDDAINRGSVVLASRRTGHLVNEKASKEAKVQALSNTNSKAKDHASVGGEEFKAYAFDYWQYLDSMVFWEGLVPTPDVIDAGHRNGVPVYGTLFFNWSNSIADQERFAEALKQDADGSFPIARKLVDMAKYYGYDGYFINQETTGDLVKPLGEKMRQFMLYSKEYAAKVNHPIKYSWYDAMTYNYGRYHQDGLGEYNYQFMQPEGDKVPADNFFANFNWDKAKNDYTIATANWIGRNPYDVFAGLELQQGGSYKTKVKWNDILDENGKLRLSLGLFAPDTITSLGKTGEDYHKNEDIFFTGYQGDPTGQKPGDKDWYGIANLVADRTPAVGNTFTTSFNTGHGKKWFVDGKVSKDSEWNYRSVSGVLPTWRWWQTSTGEKLRAEYDFTDAYNGGNSLKFSGDVAGKTDQDVRLYSTKLEVTEKTKLRVAHKGGKGSKVYMAFSTTPDYKFDDADAWKELTLSDNWTNEEFDLSSLAGKTIYAVKLFFEHEGAVKDYQFNLGQLTISDNHQEPQSPTSFSVVKQSLKNAQEAEAVVQFKGNKDADFYEVYEKDGDNWKLLTGSSSTTIYLPKVSRSASAQGTTQELKVVAVGKNGVRSEAATTTFDWGMTVKDTSLPKPLAENIVPGATVIDSTFPKTEGGEGIEGMLNGTITSLSDKWSSAQLSGSVDIRLTKPRTVVRWVMDHAGAGGESVNDGLMNTKDFDLYYKDADGEWKLAKEVRGNKAHVTDVTLDKPITAQDWRLNVVTSDNGTPWKAIRIYNWKMYEKLDTESVNIPMAKVAARSLGNNKVQVGFADVPAGATITVYDNPNSQTPLATLKSEVGGDLASAPLDLTNQSGLLYYRTQLPGKEISNVLAVSVPKDDRRIKSVSLETGPKKTSYAEGEDLDLRGGVLRVQYEGGTEDELIRLTHAGVSVSGFDTHHKGEQNLTLQYLGQPVNANLSVTVTGQDEASPKTILGIEVSQEPKKDYLVGDSLDLSEGRFAVAYSNDTMEEHSFTDEGVEISGYDAQKTGRQTLTLRYQGHEVNFDVLVSPKAALNDEYLKQKLAEVEAAKNKVVYNFASPEVKEVFLKAIEAAEQVLKDHETSTQDQVNDRLNKLTEAHKALNGQEKFKEEKTELDRLTGEVQELLAAKPNHPSGSALAPLLEKNKVLVEKVDLSPEELATAKQSLKDLVALLKEDKPAVFSDSKTGVEVHFSNKEKTVIKGLKVERVQASAEEKKYFAGEDAHVFEIEGLDEKGQDVDLSYASIVKIPIEKDKKVKKVFFLPEGKEAVELAFEQTDSHVIFTAPHFTHYAFVYESAEKPQPAKPAPQNKVLPKPTYQPASDQQKAPKLEVQEEKVAFHRQEHENTEMLVGEQRVIIQGRDGLLRHVFEVDENGQRRLRSTEVIQEAIPEIVEIGTKVKTVPAVVATQEKPAQNTAVKSEEASKQLPNTGTADANEALIAGLASLGLASLALTLRRKREDKD

SEQ ID NO: 74 - protein, 1659 aa, Streptococcus pneumoniae Pj-1242; identical to SEQ ID NO: 59

SEQ ID NO: 75 - protein, 1646 aa, Streptococcus pneumoniae Pj-1248
MKNPFFERRCRYSIRKLSVGACSLMIGAVLFAGPALAEETAVPENSGANTELVSGESEHSTNEADKQNEGEHTRENKLEKAEGVATASETAEAASAAKPEEKASEVVAETPSAEAKPKSDKETEAKPEATNQGDESKPAAEANKTEKEVQPDVPKNTEKTLKPKEIKFNSWEELLKWEPGAREDDAINRGSVVLASRRTGHLVNEKASKEAKVQALSNTNSKAKDHASVGGEEFKAYAFDYWQYLDSMVFWEGLVPTPDVIDAGHRNGVPVYGTLFFNWSNSIADQERFAEALKQDADGSFPIARKLVDMAKYYGYDGYFINQETTGDLVKPLGEKMRQFMLYSKEYAAKVNHPIKYSWYDAMTYNYGRYHQDGLGEYNYQFMQPEGDKVPADNFFANFNWDKAKNDYTIATANWIGRNPYDVFAGLELQQGGSYKTKVKWNDILDENGKLRLSLGLFAPDTITSLGKTGEDYHKNEDIFFTGYQGDPTGQKPGDKDWYGIANLVADRTPAVGNTFTTSFNTGHGKKWFVDGKVSKDSEWNYRSVSGVLPTWRWWQTSTGEKLRAEYDFTDAYNGGNSLKFSGDVAGKTDQDVRLYSTKLEVTEKTKLRVAHKGGKGSKVYMAFSTTPDYKFDDADAWKELTLSDNWTNEEFDLSSLAGKTIYAVKLFFEHEGAVKDYQFNLGQLTISDNHQEPQSPTSFSVVKQSLKNAQEAEAVVQFKGNKDADFYEVYEKDGDSWKLLTGSSSTTIYLPKVSRSASAQGTTQELKVVAVGKNGVRSEAATTTFDWGMTVKDTSLPKPLAENIVPGATVIDSTFPKTEGGEGIEGMLNGTITSLSDKWSSAQLSGSVDIRLTKPRTVVRWVMDHAGAGGESVNDGLMNTKDFDLYYKDADGEWKLAKEVRGNKAHVTDITLDKPITAQDWRLNVVTSDNGTPWKAIRIYNWKMYEKLDTESVNIPMAKAAARSLGNNKVQVGFADVPAGATITVYDNPNSQTPLATLKSEVGGDLASAPLDLTNQSGLLYYRTQLPGKEISNVLAVSVPKDDRRIKSVSLETGPKKTSYAEGEDLDLRGGVLRVQYEGGTEDELIRLTHAGVSVSGFDTHHKGEQNLTLQYLGQPVNANLSVTVTGQDEASPKTILGIEVSQEPKKDYLVGDSLDLSEGRFAVAYSNDTMEEHSFTDEGVEISGYDAQKTGRQTLTLHYQGHEVSFDVLVSPKAALNDEYLKQKLAEVEAAKNKVVYNFASSEVKEAFLKAIEAAEQVLKDHETSTQDQVNDRLNKLTEAHKALNGQEKFTEEKTELDRLTGEVQELLAAKPNHPSGSALAPLLEKNKALVEKVDLSPEELTTAKQSLKDLVALLKEDKPAVFSDSKTGVEVHFSNKEKTVIKGLKVERVQASAEEKKYFAGEDAHVFEIEGLDEKGQDVDLSYASIVKIPIEKDKKVKKVFFLPEGKEAVELAFEQTDSHVIFTAPHFTHYAFVYESAEKPQPAKPAPQNTVLPKPTYQPTSDQQKAPKLEVQEEKVAFHRQEHENTEMLVGEQRVIIQGRDGLLRHVFEVDENGQRRLRSTEVIQEAIPEIVEIGTKVKTVPAVVATQEKPAQNTAVKSEEASKQLPNTGTADANEALIAGLASLGLASLALTLRRKREDKD

SEQ ID NO: 76 - protein, 1659 aa, Streptococcus pneumoniae Pj-1250; identical to SEQ ID NO: 51

SEQ ID NO: 77 - protein, 1646 aa, Streptococcus pneumoniae Pj-1255
MKNPFFERRCRYSIRKLSVGACSLMIGAVLFAGPALAEETAVPENSGANTELVSGESEHSTNEADKQNEGEHTRENKLEKAEGVATASETAEAASAAKPEEKASEAVAETPSAEAKPKSDKETEAKPEATNQGDESKPAAEANKTEKEVQPDVPKNTEKTLKPKEIKFNSWEELLKWEPGAREDDAINRGSVVLASRRTGHLVNEKASKEAKVQALSNTNSKAKDHASVGGEEFKAYAFDYWQYLDSMVFWEGLVPTPDVIDAGHRNGVPVYGTLFFNWSNSIADQERFAEALKQDADGSFPIARKLVDMAKYYGYDGYFINQETTGDLVKPLGEKMRQFMLYSKEYAAKVNHPIKYSWYDAMTYNYGRYHQDGLGEYNYQFMQPEGDKVPADNFFANFNWDKAKNDYTIATANWIGRNPYDVFAGLELQQGGSYKTKVKWNDILDENGKLRLSLGLFAPDTITSLGKTGEDYHKNEDIFFTGYQGDPTGQKPGDKDWYGIANLVADRTPAVGNTFTTSFNTGHGKKWFVDGKVSKDSEWNYRSVSGVLPTWRWWQTSTGEKLRAEYDFTDAYNGGNSLKFSGDVAGKTVQDVRLYSTKLEVTEKTKLRVAHKGGKGSKVYMAFSTTSDYKFDDADAWKELTLSDNWTNEEFDLSSLAGKTIYAVKLFFEHEGAVKDYQFNLGQLTISDNHQEPQSPTSFSVVKQSLKNAQEAEAVVQFKGNKDADFYEVYEKDGDSWKLLTGSSSTTIYLPKVSRSASAQGTTQELKVVAVGKNGVRSEAATTTFDWGMTVKDTSLPKPLAENIVPGATVIDSTFPKTEGGEGIEGMLNGTITSLSDKWSSAQLSGSVDIRLTKPRTVVRWVMDHAGAGGESVNDGLMNTKDFDLYYKDADGEWKLAKEVRGNKAHVTDITLDKPITAQDWRLNVVTSDNGTPWKAIRIYNWKMYEKLDTESVNIPMAKAAARSLGNNKVQVGFSDVPAGATITVYDNPNSQTPLATLKSEVGGDLASAPLDLTNQSGLLYYRTQLPGKEISNVLAVSVPKDDRRIKSVSLETGPKKTSYAEGEDLDLRGGVLRVQYEGGTEDELIRLTHAGVSVSGFDTHHKGEQNLTLQYLGQPVNANLSVTVTGKDEASPKTILGIEVSQEPKKDYLVGDSLDLSEGRFAVAYSNDTMEEHSFTDEGVEISGYDAQKTGRQTLTLHYQGHEVSFDVLVSPKAALNDEYLKQKLAEVEAAKNKVVYNFASPEVKEAFLKAIEAAEQVLKDHETSTQDQVNDRLNKLTEAHKALNGQEKFKEEKTELDRLTGEVQELLAAKPNHPSGSALAPLLEKNKALVEKVDLSPEELTTAKQSLKDLVALLKEDKPAVFSDSKTGVEVHFSNKEKTVIKGLKVERVQASAEEKKYFAGEDAHVFEIEGLDEKGQDVDLSYASIVKIPIEKDKKVKKVFFLPEGKEAVELAFEQTDSHVIFTAPHFTHYAFVYESAEKPQPAKPAPQNTVLPKPTYQPASDQQKAPKLEVQEEKVAFHRQEHENAEMLVGEQRVIIQGRDGLLRHVFEVDENGQRRLRSTEVIQEAIPEIVEIGTKVKTVPAVVATQEKPAQNTAVKSEEASKQLPNTGTADANEALIAGLASLGLASLALTLRRKREDKD

SEQ ID NO: 78 - protein, 1636 aa, Streptococcus pneumoniae Pj-1262
MKNPFFERRCRYSIRKLSVGACSLMIGAVLFAGPALAEETAVPENSGANTELVSGESEHSTNEADKQNEGEHARENKLEKAEAASAAKPEEKAGEVVAETPSAEAKPKSDKETEAKPEATNQGDESKPAAEANKTEKEVQPDVPKNTEKTLKPKEIKFNSWEELLKWEPGAREDDAINRGSVVLASRRTGHLVNEKASKEAKVQALSNTNSKAKDHASVGGEEFKAYAFDYWQYLDSMVFWEGLVPTPDVIDAGHRNGVPVYGTLFFNWSNSIADQERFAEALKQDADGSFPIARKLVDMAKYYGYDGYFINQETTGDLVKPLGEKMRQFMLYSKEYAAKVNHPIKYSWYDAMTYNYGRYHQDGLGEYNYQFMQPEGDKVPADNFFANFNWDKAKNDYTIATANWIGRNPYDVFAGLELQQGGSYKTKVKWNDILDENGKLRLSLGLFAPDTITSLGKTGEDYHKNEDIFFTGYQGDPTGQKPGDKDWYGIANLVADRTPAVGNTFTTSFNTGHGKKWFVDGKVSKDSEWNYRSVSGVLPTWRWWQTSTGEKLRAEYDFTDAYNGGNSLKFSGDVAGKTDQDVRLYSTKLEVTEKTKLRVAHKGGKGSKVYMAFSTTPDYKFDDADAWKELTLSDNWTNEEFDLSSLAGKTIYAVKLFFEHEGAVKDYRFNLGQLTISDNHQEPQSPTSFSVVKQSLKNAQEAEAVVQFKGNKDADFYEVYEKDGDSWKLLTGSSSTTIYLPKVSRSASAQGTTQELKVVAVGKNGVRSEAATTTFEWGMTVQDTSLPRPLAENIVPGATVIGSTFPDTEGGEGIEGMLNGTITSLSDKWSSAQLSGSVDIRLTKPRTVVRWVMDHAGAGGESVNDGLMNTKDFDLYYKDADGEWKLAKEVRGNKAHVTDITLDKPITAQDWRLNVVTSDNGTPWKAIRIYNWKMYEKLDTESVNIPMAKAAARSLGNNKVQVGFADVPAGATITVYDNPNSQTPLATLKSEVGGDLASAPLDLTNQSGLLYYRTQLPGKEISNVLAVSVPKDDRRIKSVSLETGPKKTSYAEGEDLDLRGGVLRVQYEGGTEDELIRLTHAGVSVSGFDTHHKGEQNLTLQYLGQPVNANLSVTVTGQDEASPKTILGIEVSQEPKKDYLVGDSLDLSEGRFAVAYSNDTMEEHSFTDEGVEISGYDAQKTGRQTLTLRYQGHEVNFDVLVSPKAALNDEYLKQKLAEVEAAKNKVVYNFASPEVKEAFLKAIEAAEQVLKDHETSTQDQVNDRLNKLTEAHKALNGQEKFKEEKTELDRLTGEVQELLAAKPNHPSGSALAPLLEKNKALVEKVDLSPEELATAKQSLKDLVALLKEDKPAVFSDSKTGVEVHFSNKEKTVIKGLKVERVQASAEEKKYFAGEDAHVFEIEGLDEKGQDVDLSYASIVKIPIEKDKKVKKVFFLPEGKEAVELAFEQTDSHVIFTAPHFTHYAFVYESAEKPQPAKPAPQNTVLPKPTYQPASDQQKAPKLEVQEEKVAFHRQEHENAEMLVGEQRVIIQGRDGLLRHVFEVDENGQRRLRSTEVIQEAIPEIVEIGTKVKTVPAVVATQEKPAQNTAVKSEEASKQLPNTGTADANEALIAGLASLGLASLALTLRRKREDKD

SEQ ID NO: 79 - protein, 1659 aa, Streptococcus pneumoniae Pj-1279
MKNPFFERRCRYSIRKLSVGACSLMIGAVLFAGPALAEETAVPENSGANTELVSGESEHSTNEADKQNEGEHARENKLEKAEGVATASETASPASNEAATTETAEAASATKPEEKASEVVAETPSVEAKPKSDKETEAKPEATNQGDESKPAAEANKTEKEVQSDVPKNTEKTLKPKEIKFNSWEELLKWEPGAREDDAINRGSVVLASRRTGHLVNEKASKEAKVQALSNTNSKAKDHASVGGEEFKAYAFDYWQYLDSMVFWEGLVPTPDVIDAGHRNGVPVYGTLFFNWSNSIADQERFAEALKQDADGSFPIARKLVDMAKYYGYDGYFINQETTGDLVKPLGEKMRQFMLYSKEYAAKVNHPIKYSWYDAMTYNYGRYHQDGLGEYNYQFMQPEGDKVPADNFFANFNWDKAKNDYTIATANWIGRNPYDVFAGLELQQGGSYKTKVKWNDILDENGKLRLSLGLFAPDTITSLGKTGEDYHKNEDIFFTGYQGDPTGQKPGDKDWYGIANLVADRTPAVGNTFTTSFNTGHGKKWFVDGKVSKDSEWNYRSVSGVLPTWRWWQTSTGEKLRAEYDFTDAYNGGNSLKFSGDVAGKTDQDVRLYSTKLEVTEKTKLRVAHKGGKGSKVYMAFSTTPDYKFDDADAWKELTLSDNWTNEEFALSSLAGKTIYAVKLFFEHEGAVKDYQFNLGQLTISDNHQEPQSPTSFSVVKQSLKNAQEAEAVVQFKGNKDADFYEVYEKDGDSWKLLTGSSSTTIYLPKVSRSASAQGTTQELKVVAVGKNGVRSEAATTTFDWGMTVKDTSLPKPLAENIVPGATVIDSTFPKTEGGEGIEGMLNGTITSLSDKWSSAQLSGSVDIRLTKPRTVVRWVMDHAGAGGESVNDGLMNTKDFDLYYKDADGEWKLAKEVRGNKAHVTDITLDKPITAQDWRLNVVTSDNGTPWKAIRIYNWKMYEKLDTESVNIPMAKAAARSLGNNKVQVGFADVPAGATITVYDNPNSQTPLATLKSEVGGDLASAPLDLTNQSGLLYYRTQLPGKEISNVLAVSVPKDDRRIKSVSLETGPKKTSYAEGEDLDLRGGVLRVQYEGGTEDELIRLTHAGVSVSGFDTHHKGEQNLTLQYLGQPVNANLSVTVTGQDEASPKTILGIEVSQEPKKDYLVGDSLDLSEGRFAVAYSNDTMEEHSFTDEGVEISGYDAQKTGRQTLTLHYQGHEVSFDVLVSPKAALNDEYLKQKLAEVEAAKNKVVYNFASPEVKEAFLKAIEAAEQVLKDHEISTQDQVNDRLNKLTEAHKALNGQEKFKEEKTELDRLTGEVQELLAAKPNHPSGSALAPLLEKNKALVEKVDLSPEELATAKQSLKDLVALLKEDKPAVFSDSKTGVEVHFSNKEKTVIKGLKVERVQASAEEKKYFAGEDAHVFEIEGLDEKGQDVDLSYASIVKIPIEKDKKVKKVFFLPEGKEAVELAFEQTDSHVIFTAPHFTHYAFVYESAEKPQPAKPAPQNTVLPKPTYQPASDQQKAPKLEVQEEKVAFHRQEHENAEMLVGEQRVIIQGRDGLLRHVFEVDEKGQRRLRSTEVIQEAIPEIVEIGTKVKTVPAVVATQEKPAQNTAVKSEEASKQLPNTGTADANETLIAGLASLGLASLALTLRRKREDKD

SEQ ID NO: 80 - protein, 1646 aa, Streptococcus pneumoniae Pj-1283
MKNPFFERRCRYSIRKLSVGACSLMIGAVLFAGPALAEETAVPENSGANTELVSGESEHSTNEADKQNEGEHARENKLEKAEGVAIASETAEAASAAKPEEKASEVVAETPSAEAKPKSDKETEAKPEATNQGDESKPAAEANKTEKEVQPDVPKNTEKTLKPKEIKFNSWEELLKWEPGAREDDAINRGSVVLASRRTGHLVNEKASKEAKVQALSNTNSKAKDHASVGGEEFKAYAFDYWQYLDSMVFWEGLVPTPDVIDAGHRNGVPVYGTLFFNWSNSIADQERFAEALKQDADGSFPIARKLVDMAKYYGYDGYFINQETTGDLVKPLGEKMRQFMLYSKEYAAKVNHPIKYSWYDAMTYNYGRYHQDGLGEYNYQFMQPEGDKVPADNFFANFNWDKAKNDYTIATANWIGRNPYDVFAGLELQQGGSYKTKVKWNDILDENGKLRLSLGLFAPDTITSLGKTGEDYHKNEDIFFTGYQGDPTGQKPGDKDWYGIANLVADRTPAVGNTFTTSFNTGHGKKWFVDGKVSKDSEWNYRSVSGVLPTWRWWQTSTGEKLRAEYDFTDAYNGGNSLKFSGDVAGKTDQDVRLYSTKLEVTEKTKLRVAHKGGKGSKVYMAFSTTPDYKFDDADAWKELTLSDNWTNEEFALSSLAGKTIYAVKLFFEHEGAVKDYQFNLGQLTISDNHQEPQSPTSFSVVKQSLKNAQEAEAVVQFKGNKDADFYEVYEKDGDSWKLLTGSSSTTIYLPKVSRSASAQGTTQELKVVAVGKNGVRSEAATTTFDWGMTVKDTSLPKPLAENIVPGATVIDSTFPKTEGGEGIEGMLNGTITSLSDKWSSAQLSGSVDIRLTKPRTVVRWVMDHAGAGGESVNDGLMNTKDFDLYYKDADGEWKLAKEVRGNKAHVTDITLDKPITAQDWRLNVVTSDNGTPWKAIRIYNWKMYEKLDTESVNIPMAKAAARSLGNNKVQVGFADVPAGATITVYDNPNSQTPLATLKSEVGGDLASAPLDLTNQSGLLYYRTQLPGKEISNVLAVSVPKDDRRIKSVSLETGPKKTSYAEGEDLDLRGGVLRVQYEGGTEDELIRLTHAGVSVSGFDTHHKGEQNLTLQYLGQPVNANLSVTVTGQDEASPKTILGIEVSQEPKKDYLVGDNLDLSEGRFAVAYSNDTMEEHSFTDEGVEISGYDAQKTGRQTLTLRYQGHEVNFDVLVSPKAALNDEYLKQKLAEVEAAKNKVVYNFASPEVKEAFLKAIEAAEQVLKDHETSTQDQVNDRLNKLTEAHKALNGQEKFTEEKTELDRLTGEAQELLAAKPNHPSGSALAPLLEKNKALVEKVDLSPEELATAKQSLKDLVALLKEDKSAVFSDSKTGVEVHFSNKEKTVIKGLKVERVQASAEEKKYFAGEDAHVFEIEGLDEKGQDVDLSYASIVKIPIEKDKKVKKVFFLPEGKEAVELAFEQTDSHVIFTAPHFTHYAFVYESAEKPQPAKPAPQNKVLPKPTYQPASDQQKAPKLEVQEEKVAFHRQEHENAEMLVGEQRVIIQGRDGLLRHVFEVDENGQRRLRSTEVIQEAIPEIVEIGTKVKTVPAVVATQEKPAQNTAVKSEEASKQLPNTGTADANEALIAGLASLGLASLALTLRRKREDKD

SEQ ID NO: 81 - protein, 1659 aa, Streptococcus pneumoniae Pj-1284
MKNPFFERRCRYSIRKLSVGACSLMIGAVLFAGPALAEETAVPENSGANTELVSGESEHSTNEADKQNEGEHARENKLEKAEGVAIASETASPASNEAATTETAEAASAAKPEEKASEVVAETPSAEAKPKSDKETEAKPEATNQGDESKPAAEANKTEKEVQPDVPKNTEKTLKPKEIKFNSWEELLKWEPGAREDDAINRGSVVLASRRTGHLVNEKASKEAKVQALSNTNSKAKDHASVGGEEFKAYAFDYWQYLDSMVFWEGLVPTPDVIDAGHRNGVPVYGTLFFNWSNSIADQERFAEALKQDADGSFPIARKLVDMAKYYGYDGYFINQETTGDLVKPLGEKMRQFMLYSKEYAAKVNHPIKYSWYDAMTYNYGRYHQDGLGEYNYQFMQPEGDKVPADNFFANFNWDKAKNDYTIATANWIGRNPYDVFAGLELQQGGSYKTKVKWNDILDENGKLRLSLGLFAPDTITSLGKTGEDYHKNEDIFFTGYQGDPTGQKPGDKDWYGIANLVADRTPAVGNTFTTSFNTGHGKKWFVDGKVSKDSEWNYRSVSGVLPTWRWWQTSTGEKLRAEYDFTDAYNGGNSLKFSGDVAGKTDQDVRLYSTKLEVTEKTKLRVAHKGGKGSKVYMAFSTTPDYKFDDADAWKELTLSDNWTNEEFDLSSLAGKTIYAVKLFFEHEGAVKDYQFNLGQLTISDNHQEPQSPTSFSVVKQSLKNAQEAEAVVQFKGNKDADFYEVYEKDGDSWKLLTGSSSTTIYLPKVSRSASAQGTTQELKVVAVGKNGVRSEAATTTFDWGMTVKDTSLPKPLAENIVPGATVIDSTFPKTEGGEGIEGMLNGTITSLSDKWSSAQLSGSVDIRLTKPRTVVRWVMDHAGAGGESVNDGLMNTKDFDLYYKDADGEWKLAKEVRGNKAHVTDITLDKPITAQDWRLNVVTSDNGTPWKAIRIYNWKMYEKLDTESVNIPMAKAAARSLGNNKVQVGFADVPAGATITVYDNPNSQTPLATLKSEVGGDLASAPLDLTNQSGLLYYRTQLPGKEISNVLAVSVPKDDRRIKSVSLETGPKKTSYAEGEDLDLRGGVLRVQYEGGTEDELIRLTHAGVSVSGFDTHHKGEQNLTLQYLGQPVNANLSVTVTGQDEASPKTILGIEVSQEPKKDYLVGDSLDLSEGRFAVAYSNDTMEEHSFTDEGVEISGYDAQKTGRQTLTLHYQGHEVSFDVLVSPKAALNDEYLKQKLAEVEAAKNKVVYNFASSEVKEAFLKAIEAAEQVLKDHETSTQDQVNDRLNKLTEAHKALNGQEKFKEEKTELDRLTGEVQELLAAKPNHPSGSALAPLLEKNKALVEKVDLSPEELATAKQSLKDLVALLKEDKPAVFSDSKTGVEVHFSNKEKTVIKGLKVERVQASAEEKKYFAGEDAHVFEIEGLDEKGQDVDLSYASIVKIPIEKDKKVKKVFFLPEGKEAVELAFEQTDSHVIFTAPHFTHYAFVYESAEKPQPAKPAPQNKVLPKPTYQPASDQQKAPKLEVQEEKVAFHRQEHENAEMLVGEQRVIIQGRDGLLRHVFEVDENGQRRLRSTEVIQEAIPEIVEIGTKVKTVPAVVATQEKPAQNTAVKSEEASKQLPNTGTADANEALIAGLASLGLASLALTLRRKREDKD

SEQ ID NO: 82 - protein, 1659 aa, Streptococcus pneumoniae Pj-1291
MKNPFFERRCRYSIRKLSVGACSLMIGAVLFAGPALAEETAVPENSGANTELVSGESEHSTNEADKQNEGEHARENKLEKAEGVATASETASPASNEAATTETAEAASAAKPEEKASEVVAETPSAEAKPKSDKETEAKPEATNQGDESKPAAEANKTEKEVQPDVPKNTEKTLKPKEIKFNSWEELLKWEPGAREDDAINRGSVVLASRRTGHLVNEKASKEAKVQALSNTNSKAKDHASVGGEEFKAYAFDYWQYLDSMVFWEGLVPTPDVIDAGHRNGVPVYGTLFFNWSNSIADQERFAEALKQDADGSFPIARKLVDMAKYYGYDGYFINQETTGDLVKPLGEKMRQFMLYSKEYAAKVNHPIKYSWYDAMTYNYGRYHQDGLGEYNYQFMQPEGDKVPADNFFANFNWDKAKNDYTIATANWIGRNPYDVFAGLELQQGGSYKTKVKWNDILDENGKLRLSLGLFAPDTITSLGKTGEDYHKNEDIFFTGYQGDPTGQKPGDKDWYGIANLVADRTPAVGNTFTTSFNTGHGKKWFVDGKVSKDSEWNYRSVSGVLPTWRWWQTSTGEKLRAEYDFTDAYNGGNSLKFSGDVAGKTDQDVRLYSTKLEVTEKTKLRVAHKGGKGSKVYMAFSTTPDYKFDDADAWKELTLSDNWTNEEFDLSSLAGKTIYAVKLFFEHEGAVKDYQFNLGQLTISDNHQEPQSPTSFSVVKQSLKNAQEAEAVVQFKGNKDADFYEVYEKDGDSWKLLTGSSSTTIYLPKVSRSASAQGTTQELKVVAVGKNGVRSEAATTTFDWGMTVKDTSLPKPLAENIVPGATVIDSTFPKTEGGEGIEGMLNGTITSLSDKWSSAQLSGSVDIRLTKSRTVVRWVMDHAGAGGESVNDGLMNTKDFDLYYKDADGEWKLAKEVRGNKAHVTDITLDKPITAQDWRLNVVTSDNGTPWKAIRIYNWKMYEKLDTESVNIPMAKAAARSLGNNKVQVGFADVPAGATITVYDNPNSQTPLATLKSEVGGDLASAPLDLTNQSGLLYYRTQLPGKEISNVLAVSVPKDDRRIKSVSLETGPKKTSYAEGEDLDLRGGVLRVQYEGGTEDELIRLTHAGVSVSGFDTHHKGEQNLTLQYLGQPVNANLSVTVTGQDEASPKTILGIEVSQEPKKDYLVGDSLDLSEGRFAVAYSNDTMEEHSFTDEGVEISGYDAQKTGRQTLTLRYQGHEVNFDVLVSPKAALNDEYLKQKLAEVEAAKNKVVYNFASPEVKEAFLKAIEAAEQVLKDHETSTQDQVNDRLNKLTEAHKALNGQEKFTEEKTELDRLTGEAQELLAAKPNHPSGSALAPLLEKNKALVEKVDLSPEELATAKQSLKDLVALLKEDKSAVFSDSKTGVEVHFSNKEKTVIKGLKVERVQASAEEKKYFAGEDAHVFEIEGLDEKGQDVDLSYASIVKIPIEKDKKVKKVFFLPEGKGAVELAFEQTDSHVIFTAPHFTHYAFVYESAEKPQPAKPAPQNKVLPKPTYQPASDQQKAPKLEVQEEKVAFHRQEHENTEMLVGEQRVIIQGRDGLLRHVFEVDEKGQRRLRSTEVIQEAIPEIVEIGTKVKTVPAVVATQEKPAQNTAVKSEEASKQLPNTGTADANEALIAGLASLGLASLALTLRRKREDKD

SEQ ID NO: 83 - protein, 1646 aa, Streptococcus pneumoniae Pj-1297
MKNPFFERRCRYSIRKLSVGACSLMIGAVLFAGPALAEETAVPENSGANTELVSGESEHSTNEADKQNEGEHTRENKLEKAEGVATASETAEAASAAKPEEKASEVVAETPSAEAKPKSDKETEAKPEATNQGDESKPAAEANKTEKEVQPDVPKNTEKTLKPKEIKFNSWEELLKWEPGAREDDAINRGSVVLASRRTGHLVNEKASKEAKVQALSNTNSKAKDHASVGGEEFKAYAFDYWQYLDSMVFWEGLVPTPDVIDAGHRNGVPVYGTLFFNWSNSIADQERFAEALKQDADGSFPIARKLVDMAKYYGYDGYFINQETTGDLVKPLGEKMRQFMLYSKEYAAKVNHPIKYSWYDAMTYNYGRYHQDGLGEYNYQFMQPEGDKVPADNFFANFNWDKAKNDYTIATANWIGRNPYDVFAGLELQQGGSYKTKVKWNDILDENGKLRLSLGLFAPDTITSLGKTGEDYHKNEDIFFTGYQGDPTGQKPGDKDWYGIANLVADRTPAVGNTFTTSFNTGHGKKWFVDGKVSKDSEWNYRSVSGVLPTWRWWQTSTGEKLRAEYDFTDAYNGGNSLKFSGDVAGKTDQDVRLYSTKLEVTEKTKLRVAHKGGKGSKVYMAFSTTPDYKFDDADAWKELTLSDNWTNEEFDLSSLAGKTIYAVKLFFEHEGAVKDYQFNLGQLTISDNHQEPQSPTSFSVVKQSLKNAQEAEAVVQFKGNKDADFYEVYEKDGDNWKLLTGSSSTTIYLPKVSRSASAQGTTQELKVVAVGKNGVRSEAATTTFDWGMTVKDTSLPKPLAENIVPGATVIDSTFPKTEGGEGIEGMLNGTITSLSDKWSSAQLSGSVDIRLTKPRTVVRWVMDHAGAGGESVNDGLMNTKDFDLYYKDADGEWKLAKEVRGNKAHVTDVTLDKPITAQDWRLNVVTSDNGTPWKAIRIYNWKMYEKLDTESVNIPMAKAAARSLGNNKVQVGFADVPAGATITVYDNPNSQTPLATLKSEVGGDLASAPLDLTNQSGLLYYRTQLPGKEISNVLAVSVPKDDRRIKSVSLETGPKKTSYAEGEDLDLRGGVLRVQYEGGTEDELIRLTHAGVSVSGFDTHHKGEQNLTLQYLGQPVNANLSVTVTGQDEASPKTILGIEVSQEPKKDYLVGDSLDLSEGRFAVAYSNDTMEEHSFTDEGVEISGYDAQKTGRQTLTLRYQGHEVNFDVLVSPKAALNDEYLKQKLAEVEAAKNKVVYNFASPEVKEAFLKAIEAAEQVLKDHETSTQDQVNDRLNKLTEAHKALNGQEKFKEEKTELDRLTGEVQELLATKPNHPSGSALAPLLEKNKALVEKVDLSPEELATAKQSLKDLVALLKEDKPAVFSDSKTGVEVHFSNKEKTVIKGLKVERVQASAEEKKYFAGEDAHVFEIEGLDEKGQDVDLSYASIVKIPIEKDKKVKKVFFLPEGKEAVELAFEQTDSHVIFTAPHFTHYAFVYESAEKPQPAKPAPQNKVLPKPTYQPASDQQKAPKLEVQEEKVAFHRQEHENTEMLVGEQRVIIQGRDGLLRHVFEVDENGQRRLRSTEVIQEAIPEIVEIGTKVKTVPAVVATQEKPAQNTAVKSEEASKQLPNTGTADANEALIAGLASLGLASLALTLRRKREDKD

SEQ ID NO: 84 - protein, 1682 aa, Streptococcus pneumoniae Pj-1298
MKNPFFERRCRYSIRKLSVGACSLMIGAVLFAGPALAEETAVPENSGANPELVSGESEHSTNEADKQNEGEHARENKLEKAEGVAIASETAEAASAAKPEEKASEVVAETPSAEAKPKSDKETEAKPEATNQGDESKPAAEANKTEKEVQPDVPKNTEKTLKPKEIKFNSWEELLKWEPGAREDDAINRGSVVLASRRTGHLVNEKASKEAKVQALSNTNSKAKDHASVGGEEFKAYAFDYWQYLDSMVFWEGLVPTPDVIDAGHRNGVPVYGTLFFNWSNSIADQERFAEALKQDADGSFPIARKLVDMAKYYGYDGYFINQETTGDLVKPLGEKMRQFMLYSKEYAAKVNHPIKYSWYDAMTYNYGRYHQDGLGEYNYQFMQPEGDKVPADNFFANFNWDKAKNDYTIATANWIGRNPYDVFAGLELQQGGSYKTKVKWNDILDENGKLRLSLGLFAPDTITSLGKTGEDYHKNEDIFFTGYQGDPTGQKPGDKDWYGIANLVADRTPAVGNTFTTSFNTGHGKKWFVDGKVSKDSEWNYRSVSGVLPTWRWWQTSTGEKLRAEYDFTDAYNGGNSLKFSGDVAGKTDQDVRLYSTKLEVTEKTKLRVAHKGGKGSKVYMAFSTTPDYKFDDADAWKELTLSDNWTNEEFALSSLAGKTIYAVKLFFEHEGAVKDYQFNLGQLTISDNHQEPQSPTSFSVVKQSLKNAQEAEAVVQFKGNKDADFYEVYEKDGDSWKLLTGSSSTTIYLPKVSRSASAQGTTQELKVVAVGKNGVRSEAATTIYLPKVSRSASAQGTTQELKVVAVGKNGVRSEAATTTFDWGMTVKDTSLPKPLAENIVPGATVIDSTFPKTEGGEGIEGMLNGTITSLSDKWSSAQLSGSVDIRLTKPRTVVRWVMDHAGAGGESVNDGLMNTKDFDLYYKDADGEWKLAKEVRGNKAHVTDITLDKPITAQDWRLNVVTSDNGTPWKAIRIYNWKMYEKLDTESVNIPMAKAAARSLGNNKVQVGFADVPAGATITVYDNPNSQTPLATLKSEVGGDLASAPLDLTNQSGLLYYRTQLPGKEISNVLAVSVPKDDRRIKSVSLETGPKKTSYAEGEDLDLRGGVLRVQYEGGTEDELIRLTHAGVSVSGFDTHHKGEQNLTLQYLGQPVNANLSVTVTGQDEASPKTILGIEVSQEPKKDYLVGDNLDLSEGRFAVAYSNDTMEEHSFTDEGVEISGYDAQKTGRQTLTLRYQGHEVNFDVLVSPKAALNDEYLKQKLAEVEAAKNKVVYNFASPEVKEAFLKAIEAAEQVLKDHETSTQDQVNDRLNKLTEAHKALNGQEKFTEEKTELDRLTGEAQELLAAKPNHPSGSALAPLLEKNKALVEKVDLSPEELATAKQSLKDLVALLKEDKSAVFSDSKTGVEVHFSNKEKTVIKGLKVERVQASAEEKKYFAGEDAHVFEIEGLDEKGQDVDLSYASIVKIPIEKDKKVKKVFFLPEGKEAVELAFEQTDSHVIFTAPHFTHYAFVYESAEKPQPAKPAPQNKVLPKPTYQPASDQQKAPKLEVQEEKVAFHRQEHENAEMLVGEQRVIIQGRDGLLRHVFEVDENGQRRLRSTEVIQEAIPEIVEIGTKVKTVPAVVATQEKPAQNTAVKSEEASKQLPNTGTADANEALIAGLASLGLASLALTLRRKREDKD

SEQ ID NO: 85 - protein, 1636 aa, Streptococcus pneumoniae Pj-1300
MKNPFFERRCRYSIRKLSVGACSLMIGAVLFAGPALAEETAVPENSGANTELVSGESEHSTNEADKQNEGEHARENKLEKAEAASAAKPEEKAGEVVAETPSAEAKPKSDKETEAKPEATNQGDESKPAAEANKTEKEVQPDVPKNTEKTLKPKEIKFNSWEELLKWEPGAREDDAINRGSVVLASRRTGHLVNEKASKEAKVQALSNTNSKAKDHASVGGEEFKAYAFDYWQYLDSMVFWEGLVPTPDVIDAGHRNGVPVYGTLFFNWSNSIADQERFAEALKQDADGSFPIARKLVDMAKYYGYDGYFINQETTGDLVKPLGEKMRQFMLYSKEYAAKVNHPIKYSWYDAMTYNYGRYHQDGLGEYNYQFMQPEGDKVPADNFFANFNWDKAKNDYTIATANWIGRNPYDVFAGLELQQGGSYKTKVKWNDILDENGKLRLSLGLFAPDTITSLGKTGEDYHKNEDIFFTGYQGDPTGQKPGDKDWYGIANLVADRTPAVGNTFTTSFNTGHGKKWFVDGKVSKDSEWNYRSVSGVLPTWRWWQTSTGEKLRAEYDFTDAYNGGNSLKFSGDVAGKTDQDVRLYSTKLEVTEKTKLRVAHKGGKGSKVYMAFSTTPDYKFDDADAWKELTLSDNWTNEEFDLSSLAGKTIYAVKLFFEHEGAVKDYQFNLGQLTISDNHQEPQSPTSFSVVKQSLKNAQEAEAVVQFKGNKDADFYEVYEKDGDSWKLLTGSSSTTIYLPKVSRSASAQGTTQELKVVAVGKNGVRSEAATTTFEWGMTVQDTSLPRPLAENIVPGATVIGSTFPDTEGGEGIEGMLNGTITSLSDKWSSAQLSGSVDIRLTKPRTVVRWVMDHAGAGGESVNDGLMNTKDFDLYYKDADGKWKLAKEVRGNKAHVTDITLDKPITAQDWRLNVVTSDNGTPWKAIRIYNWKMYEKLDTESVNIPMAKAAARSLGNNKVQVGFADVPAGATITVYDNPNSQTPLATLKSEVGGDLASAPLDLTNQSGLLYYRTQLPGKEISNVLAVSVPKDDRRIKSVSLETGPKKTSYAEGEDLDLRGGVLRVQYEGGTEDELIRLTHAGVSVSGFDTHHKGEQNLTLQYLGQPVNANLSVTVTGQDEASPKTILGIEVSQEPKKDYLVGDSLDLSEGRFAVAYSNDTMEEHSFTDEGVEISGYDAQKTGRQTLTLRYQGHEVNFDVLVSPKAALNDEYLKQKLAEVEAAKNKVVYNFASPEVKEAFLKAIEAAEQVLKDHETSTQDQVNDRLNKLTEAHKALNGQEKFKEEKTELDRLTGEVQELLAAKPNHPSGSALAPLLEKNKALVEKVDLSPEELATAKQSLKDLVALLKEDKPAVFSDSKTGVEVHFSNKEKTVIKGLKVERVQASAEEKKYFAGEDAHVFEIEGLDEKGQDVDLSYASIVKIPIEKDKKVKKVFFLPEGKEAVELAFEQTDSHVIFTAPHFTHYAFVYESAEKPQPAKPAPQNKVLPKPTYQPASDQQKAPKLEVQEEKVAFHRQEHENTEMLVGEQRVIIQGRDGLLRHVFEVDENGQRRLRSTEVIQEAIPEIVEIGTKVKTVPAVVATQEKPAQNTAVKSEEASKQLPNTGTADANEALIAGLASLGLASLALTLRRKREDKD

SEQ ID NO: 86 - protein, 1646 aa, Streptococcus pneumoniae Pj-1322
MKNPFFERRCRYSIRKLSVGACSLMIGAVLFAGPALAEETAVPENSGANTELVSGESEHSTNEADKQNEGEHTRENKLEKAEGVATASETAEAASAAKPEEKASEVVAETPSAEAKPKSDKETEAKPEATNQGDESKPAAEANKTEKEVQPDVPKNTEKTLKPKEIKFNSWEELLKWEPGAREDDAINRGSVVLASRRTGHLVNEKASKEAKVQALSNTNSKAKDHASVGGEEFKAYAFDYWQYLDSMVFWEGLVPTPDVIDAGHRNGVPVYGTLFFNWSNSIADQERFAEALKQDADGSFPIARKLVDMAKYYGYDGYFINQETTGDLVKPLGEKMRQFMLYSKEYAAKVNHPIKYSWYDAMTYNYGRYHQDGLGEYNYQFMQPEGDKVPADNFFANFNWDKAKNDYTIATANWIGRNPYDVFAGLELQQGGSYKTKVKWNDILDENGKLRLSLGLFAPDTITSLGKTGEDYHKNEDIFFTGYQGDPTGQKPGDKDWYGIANLVADRTPAVGNTFTTSFNTGHGKKWFVDGKVSKDSEWNYRSVSGVLPTWRWWQTSTGEKLRAEYDFTDAYNGGNSLKFSGDVAGKTDQDVRLYSTKLEVTEKTKLRVAHKGGKGSKVYMAFSTTPDYKFDDADAWKELTLSDNWTNEEFDLSSLAGKTIYAVKLFFEHEGAVKDYQFNLGQLTISDNHQEPQSPTSFSVVKQSLKNAQEAEAVVQFKGNKDADFYEVYEKDGDSWKLLTGSSSTTIYLPKVSRSASAQGTTQELKVVAVGKNGVRSEAATTTFDWGMTVKDTSLPKPLAENIVPGATVIDSTFPKTEGGEGIEGMLNGTITSLSDKWSSAQLSGSVDIRLTKPRTVVRWVMDHAGAGGESVNDGLMNTKDFDLYYKDADGEWKLAKEVRGNKAHVTDITLDKPITAQDWRLNVVTSDNGTPWKAIRIYNWKMYEKLDTESVNIPMAKAAARSLGNNKVQVGFADVPAGATITVYDNPNSQTPLATLKSEVGGDLASAPLDLTNQSGLLYYRTQLPGKEISNVLAVSVPKDDRRIKSVSLETGPKKTSYAEGEDLDLRGGVLRVQYEGGTEDELIRLTHAGVSVSGFDTHHKGEQNLTLQYLGQPVNANLSVTVTGQDEASPKTILGIEVSQKPKKNYLVGDSLDLSEGRFAVAYSNDTMEEHSFTDEGVEISGYDAQKIGRQTLTLRYQGHEVNFDVLVSPKAALNDEYLKQKLAEVEAAKNKVVYNFASPEVKEAFLKAIEAAEQVLKDHEISTQDQVNDRLNKLTEAHKALNGQEKFKEEKTELDRLTGEVQELLDAKPNHPSGSALAPLLEKNKVLVEKVDLSPEELATAKQSLKDLVALLKEDKPAVFSDSKTGVEVHFSNKEKTVIKGLKVERVQASAEEKKYFAGEDAHVFEIEGLDEKGQDVDLSYASIVKIPIEKDKKVKKVFFLPEGKEAVELAFEQTDSHVIFTAPHFTHYAFVYESAEKPQPAKPAPQNKVLPKPTYQPASDQQKAPKLEVQEEKVAFHRQEHENAEMLVGEQRVIIQGRDGLLRHVFEVDENGQRRLRSTEVIQEAIPEIVEIGTKVKTVPAVVATQEKPAQNTAVKSEEASKQLPNTGTADANEALIAGLASLGLASLALTLRRKREDKD

SEQ ID NO: 87 - protein, 1646 aa, Streptococcus pneumoniae Pj-1330; identical to SEQ ID NO: 75

SEQ ID NO: 88 - protein, 1659 aa, Streptococcus pneumoniae Pj-1347
MKNPFFERRCRYSIRKLSVGACSLMIGAVLFAGPALAEETAVPENSGANTELVSGESEHSTNEADKQNEGEHARENKLEKAEGVAIASETASPASNEAATTETAEAASAAKPEEKASEVVAETPSAEAKPKSDKETEAKPEATNQGDESKPAEEANKTEKEVQPDVPKNTEKTLKPKEIKFNSWEELLKWEPGAREDDAINRGSVVLASRRTGHLVNEKASKEAKVQALSNTNSKAKDHASVGGEEFKAYAFDYWQYLDSMVFWEGLVPTPDVIDAGHRNGVPVYGTLFFNWSNSIADQERFAEALKQDADGSFPIARKLVDMAKYYGYDGYFINQETTGDLVKPLGEKMRQFMLYSKEYAAKVNHPIKYSWYDAMTYNYGRYHQDGLGEYNYQFMQPEGDKVPADNFFANFNWDKAKNDYTIATANWIGRNPYDVFAGLELQQGGSYKTKVKWNDILDENGKLRLSLGLFAPDTITSLGKTGEDYHKNEDIFFTGYQGDPTGQKPGDKDWYGIANLVADRTPAVGNTFTTSFNTGHGKKWFVDGKVSKDSEWNYRSVSGVLPTWRWWQTSTGEKLRAEYDFTDAYNGGNSLKFSGDVAGKTDQDVRLYSTKLEVTEKTKLRVAHKGGKGSKVYMAFSTTPDYKFDDADAWKELTLSDNWTNEEFDLSSLAGKTIYAVKLFFEHEGAVKDYQFNLGQLTISDNHQEPQSPTSFSVVKQSLKNAQEAEAVVQFKGNKDADFYEVYEKDGDSWKLLTGSSSTTIYLPKVSRSASAQGTTQELKVVAVGKNGVRSEAATTTFDWGMTVKDTSLPKPLAENIVPGATVIDSTFPKTEGGEGIEGMLNGTITSLSDKWSSAQLSGSVDIRLTKSRTVVRWVMDHAGAGGESVNDGLMNTKDFDLYYKDADGEWKLAKEVRGNKAHVTDITLDKPITAQDWRLNVVTSDNGTPWKAIRIYNWKMYEKLDTESVNIPMAKAAARSLGNNKVQVGFADVPAGATITVYDNPNSQTPLATLKSEVGGDLASAPLDLTNQSGLLYYRTQLPGKEISNVLAVSVPKDDRRIKSVSLETGPKKTSYAEGEDLDLRGGVLRVQYEGGTEDELIRLTHAGVSVSGFDTHHKGEQNLTLQYLGQPVNANLSVTVTGQDEASPKTILGIEVSQEPKKDYLVGDSLDLSEGRFAVAYSNDTMEEHSFTDEGVEISGYDAQKTGRQTLTLRYQGHEVNFDVLVSPKAALNDEYLKQKLAEVEAAKNKVVYNFASPEVKAAFLKAIEAAEQVLKDHEISTQDQVNDRLNKLTEAHKALNGQEKFKEEKTELDRLTGEVQELLDAKPNHPSGSALAPLLEKNKVLVEKVDLSPEELATAKQSLKDLVALLKEDKPAVFSDSKTGVEVHFSNKEKTVIKGLKVERVQASAEEKKYFAGEDAHVFEIEGLDEKGQDVDLSYASIVKIPIEKDKKVKKVFFLPEGKEAVELAFEQTDSHVIFTAPHFTHYAFVYESAEKPQPAKPAPQNTVLPKPTYQPASDQQKAPKLEVQEEKVAFHRQEHENAEMLVGEQRVIIQGRDGLLRHVFEVDENGQRRLRSTEVIQEAIPEIVEIGTKVKTVPAVVATQEKPAQNTAVKSEEASKQLPNTGTADANEALIAGLASLGLASLALTLRRKREDKD

SEQ ID NO: 89 - protein, 1646 aa, Streptococcus pneumoniae Pj-1369
MKNPFFERRCRYSIRKLSVGACSLMIGAVLFAGPALAEETAVPENSGANTELVSGESEHSTNEADKQNEGEHTRENKLEKAEGVATASETAEAASAAKPEEKASEVVAETPSAEAKPKSDKETEAKPEATNQGDESKPAAEANKTEKEVQPDVPKNTEKTLKPKEIKFNSWEELLKWEPGAREDDAINRGSVVLASRRTGHLVNEKASKEAKVQALSNTNSKAKDHASVGGEEFKAYAFDYWQYLDSMVFWEGLVPTPDVIDAGHRNGVPVYGTLFFNWSNSIADQERFAEALKQDADGSFPIARKLVDMAKYYGYDGYFINQETTGDLVKPLGEKMRQFMLYSKEYAAKVNHPIKYSWYDAMTYNYGRYHQDGLGEYNYQFMQPEGDKVPVDNFFANFNWDKAKNDYTIATANWIGRNPYDVFAGLELQQGGSYKTKVKWNDILDENGKLRLSLGLFAPDTITSLGKTGEDYHKNEDIFFTGYQGDPTGQKPGDKDWYGIANLVADRTPAVGNTFTTSFNTGHGKKWFVDGKVSKDSEWNYRSVSGVLPTWRWWQTSTGEKLRAEYDFTDAYNGGNSLKFSGDVAGKTDQDVRLYSTKLEVTEKTKLRVAHKGGKGSKVYMAFSTTPDYKFDDADAWKELTLSDNWTNEEFDLSSLAGKTIYAVKLFFEHEGAVKDYQFNLGQLTISDNHQEPQSPTSFSVVKQSLKNAQEAEAVVQFKGNKDADFYEVYEKDGDNWKLLTGSSSTTIYLPKVSRSASAQGTTQELKVVAVGKNGVRSEAATTTFDWGMTVKDTSLPKPLAENIVPGATVIDSTFPKTEGGEGIEGMLNGTITSLSDKWSSAQLSGSVDIRLTKPRTVVRWVMDHAGAGGESVNDGLMNTKDFDLYYKDADGEWKLAKEVRGNKAHVTDITLDKPITAQDWRLNVVTSDNGTPWKAIRIYNWKMYEKLDTESVNIPMAKAAARSLGNNKVQVGFSDVPAGATITVYDNPNSQTPLATLKSEVGGDLASAPLDLTNQSGLLYYRTQLPGKEISNVLAVSVPKDDRRIKSVSLETGPKKTSYAEGEDLDLRGGVLRVQYEGGTEDELIRLTHAGVSVSGFDTHHKGEQNLTLQYLGQPVNANLSVTVTGQDEASPKTILGIEVSQEPKKDYLVGDSLDLSEGRFAVAYSNDTMEEHSFTDEGVEISGYDAQKTGRQTLTLHYQGHEVSFDVLVSPKAALNDEYLKQKLAEVEAAKNKVVYNFASSEVKEAFLKAIEAAEQVLKDHETSTQDQVNDRLNELTEAHKALNGQEKFTEEKTELDRLTGEVQELLAAKPNHPSGSALAPLLEKNKALVEKVDLSPEELTTAKQSLKDLVALLKEDKPAVFSDSKTGVEVHFSNKEKTVIKGLKVERVQASAEEKKYFAGEDAHVFEIEGLDEKGQDVDLSYASIVKIPIEKDKKVKKVFFLPEGKEAVELAFEQTDSHVIFTAPHFTHYAFVYESAEKPQPAKPAPQNTVLPKPTYQPTSDQQKAPKLEVQEEKVAFHRQEHENTEMLVGEQRVIIQGRDGLLRHVFEVDENGQRRLRSTEVIQEAIPEIVEIGTKVKTVPAVVATQEKPAQNTAVKSEEASKQLPNTGTADANEALIAGLASLGLASLALTLRRKREDKD

SEQ ID NO: 90 - protein, 1646 aa, Streptococcus pneumoniae Pj-1386; identical to SEQ ID NO: 67

SEQ ID NO: 91 - protein, 1646 aa, Streptococcus pneumoniae PBI-71
MKNPFFERRCRYSIRKLSVGACSLMIGAVLFAGPALAEETAVPENSGANTELVSGESEHSTNEADKQNEGEHARENKLEKAEGVATASETAEAASAAKPEEKAGEVVAETPSAEAKPKSDKETEAKPEATNQGDESKPAAEANKTEKEVQPDVPKNTEKTLKPKEIKFNSWEELLKWEPGAREDDAINRGSVVLASRRTGHLVNEKASKEAKVQALSNTNSKAKDHASVGGEEFKAYAFDYWQYLDSMVFWEGLVPTPDVIDAGHRNGVPVYGTLFFNWSNSIADQERFAEALKQDADGSFPIARKLVDMAKYYGYDGYFINQETTGDLVKPLGEKMRQFMLYSKEYAAKVNHPIKYSWYDAMTYNYGRYHQDGLGEYNYQFMQPEGDKVPADNFFANFNWDKAKNDYTIATANWIGRNPYDVFAGLELQQGGSYKTKVKWNDILDENGKLRLSLGLFAPDTITSLGKTGEDYHKNEDIFFTGYQGDPTGQKPGDKDWYGIANLVADRTPAVGNTFTTSFNTGHGKKWFVDGKVSKDSEWNYRSVSGVLPTWRWWQTSTGEKLRAEYDFTDAYNGGNSLKFSGDVAGKTDQDVRLYSTKLEVTEKTKLRVAHKGGKGSKVYMAFSTTPDYKFDDADAWKELTLSDNWTNEEFDLSSLAGKTIYAVKLFFEHEGAVKDYQFNLGQLTISDNHQEPQSPTSFSVVKQSLKNAQEAEAVVQFKGNKDADFYEVYEKDGDSWKLLTGSSSTTIYLPKVSRSASAQGTTQELKVVAVGKNGVRSEAATTTFDWGMTVKDTSLPKPLAENIVPGATVIDSTFPKTEGGEGIEGMLNGTITSLSDKWSSAQLSGSVDIRLTKPRTVVRWVMDHAGAGGESVNDGLMNTKDFDLYYKDADGEWKLAKEVRGNKAHVTDITLDKPITAQDWRLNVVTSDNGTPWKAIRIYNWKMYEKLDTESVNIPMAKAAARSLGNNKVQVGFADVPAGATITVYDNPNSQIPLATLKSEVGGDLASAPLDLTNQSGLLYYRTQLPGKEISNVLAVSVPKDDRRIKSVSLETGPKKTSYAEGEDLDLRGGVLRVQYEGGTEDELIRLTHAGVSVSGFDTHHKGEQNLTLQYLGQPVNANLSVTVTGQDEASPKTILGIEVSQEPKKDYLVGDSLDLSEGRFAVAYSNDTMEEHSFTDEGVEISGYDAQKTGRQTLTLHYQGHEVSFDVLVSPKAALNDEYLKQKLAEVEAAKNKVVYNFASSEVKEAFLKAIEAAEQVLKDHEISTQDQVNDRLNKLTEAHKALNGQEKFKEEKTELDRLTGEVQELLAAKPNHPSGSALAPLLEKNKALVEKVDLSPEELATAKQSLKDLVALLKEDKPAVFSDSKTGVEVHFSNKEKTVIKGLKVERVQASAEEKKYFAGEDAHVFEIEGLDEKGQDVDLSYASIVKIPIEKDKKVKKVFFLPEGKEAVELAFEQTDSHVIFTAPHFTHYAFVYESAEKPQPAKPAPQNKVLPKPTYQPASDQQKAPKLEVQEEKVAFHRQEHENAEMLVGEQRVIIQGRDGLLRHVFEVDENGQRRLRSTEVIQEAIPEIVEIGTKVKTVPAIVATQEKPAQNTAVKSEEASKQLPNTGTADANEALIAGLASLGLASLALTLRRKREDKD

SEQ ID NO: 92 - protein, 1659 aa, Streptococcus pneumoniae TIGR4_DB
MKNPFFERRCRYSIRKLSVGACSLMIGAVLFAGPALAEETAVPENSGANTELVSGESEHSTNEADKQNEGEHARENKLEKAEGVAIASETASPASNEAATTETAEAASAAKPEEKASEVVAETPSAEAKPKSDKETEAKPEATNQGDESKPAAEANKTEKEVQPDVPKNTEKTLKPKEIKFNSWEELLKWEPGAREDDAINRGSVVLASRRTGHLVNEKASKEAKVQALSNTNSKAKDHASVGGEEFKAYAFDYWQYLDSMVFWEGLVPTPDVIDAGHRNGVPVYGTLFFNWSNSIADQERFAEALKQDADGSFPIARKLVDMAKYYGYDGYFINQETTGDLVKPLGEKMRQFMLYSKEYAAKVNHPIKYSWYDAMTYNYGRYHQDGLGEYNYQFMQPEGDKVPADNFFANFNWDKAKNDYTIATANWIGRNPYDVFAGLELQQGGSYKTKVKWNDILDENGKLRLSLGLFAPDTITSLGKTGEDYHKNEDIFFTGYQGDPTGQKPGDKDWYGIANLVADRTPAVGNTFTTSFNTGHGKKWFVDGKVSKDSEWNYRSVSGVLPTWRWWQTSTGEKLRAEYDFTDAYNGGNSLKFSGDVAGKTDQDVRLYSTKLEVTEKTKLRVAHKGGKGSKVYMAFSTTPDYKFDDADAWKELTLSDNWTNEEFDLSSLAGKTIYAVKLFFEHEGAVKDYQFNLGQLTISDNHQEPQSPTSFSVVKQSLKNAQEAEAVVQFKGNKDADFYEVYEKDGDSWKLLTGSSSTTIYLPKVSRSASAQGTTQELKVVAVGKNGVRSEAATTTFDWGMTVKDTSLPKPLAENIVPGATVIDSTFPKTEGGEGIEGMLNGTITSLSDKWSSAQLSGSVDIRLTKPRTVVRWVMDHAGAGGESVNDGLMNTKDFDLYYKDADGEWKLAKEVRGNKAHVTDITLDKPITAQDWRLNVVTSDNGTPWKAIRIYNWKMYEKLDTESVNIPMAKAAARSLGNNKVQVGFADVPAGATITVYDNPNSQTPLATLKSEVGGDLASAPLDLTNQSGLLYYRTQLPGKEISNVLAVSVPKDDRRIKSVSLETGPKKTSYAEGEDLDLRGGVLRVQYEGGTEDELIRLTHAGVSVSGFDTHHKGEQNLTLQYLGQPVNANLSVTVTGQDEASPKTILGIEVSQEPKKDYLVGDSLDLSEGRFAVAYSNDTMEEHSFTDEGVEISGYDAQKTGRQTLTLHYQGHEVSFDVLVSPKAALNDEYLKQKLAEVEAAKNKVVYNFASSEVKEAFLKAIEAAEQVLKDHETSTQDQVNDRLNKLTEAHKALNGQEKFTEEKTELDRLTGEVQELLAAKPNHPSGSALAPLLEKNKALVEKVDLSPEELTTAKQSLKDLVALLKEDKPAVFSDSKTGVEVHFSNKEKTVIKGLKVERVQASAEEKKYFAGEDAHVFEIEGLDEKGQDVDLSYASIVKIPIEKDKKVKKVFFLPEGKEAVELAFEQTDSHVIFTAPHFTHYAFVYESAEKPQPAKPAPQNTVLPKPTYQPTSDQQKAPKLEVQEEKVAFHRQEHENTEMLVGEQRVIIQGRDGLLRHVFEVDENGQRRLRSTEVIQEAIPEIVEIGTKVKTVPAVVATQEKPAQNTAVKSEEASKQLPNTGTADANEALIAGLASLGLASLALTLRRKREDKD

SEQ ID NO: 93 - protein, 1659 aa, Streptococcus pneumoniae TIGR4_IC; identical to SEQ ID NO: 92

SEQ ID NO: 94 - protein, 264 aa, Streptococcus pneumoniae Pj-102-59
MKKKFFLSALLISLFGLAAAKPVQADTSIADIQKRGELVVGVKQDVPNFGYKDPKTGTYSGIETDLAKMVADELKVKIRYVPVTAQTRGPLLDNEQVDMDIATFTITDERKKLYNFTSPYYTDASGFLVNKSAKIKKIEDLNGKTIGVAQGSITQRLITELGKKKGLKFKFVELGSYPELITSLHAHRIDAFSVDRSILSGYTNKRTALLDDSFKPSDYGIVTKKSNTELNDYLDNLVTKWSKDGSLQKLYDRYKLKPSSHTAD

SEQ ID NO: 95 - protein, 264 aa, Streptococcus pneumoniae Pj-102-77
MKKKFFLSALLISLFGLVAAKPVQANTSIADIQKRGELVVGVKQDVPNFGYKDPKTGTYSGIETDLAKMVADELKVKIHYVPVTAQTRGPLLDNEQVDMDIATFTITDERKKLYNFTSPYYTDASGFLVNKSAKIKKIEDLNGKTIGVAQGSITQRLITELGKKKGLKFKFVELGSYPELITSLHAHRIDAFSVDRSILSGYTSKRTELLDDSFKPSDYGIVTKKSNTELNDYLDNLVTKWSKDGSLQKLYDRYKLKPSSHTAD

SEQ ID NO: 96 - protein, 264 aa, Streptococcus pneumoniae Pj-102-93
MKKKFFLSALLISLFGLAAAKPVQADTSIADIQKRGELVVGVKQDVPNFGYKDPKTGTYSGIETDLAKIVADELKVKIRYVPVTAQTRGPLLDNEQVDMDIATFTITDERKKLYNFTSPYYTDASGFLVNKSAKIKKIEDLNGKTIGVAQGSITQRLITELGKKKGLTFKFVELGSYPELITSLHAHRIDAFSVDRSILSGYTSKRTELLDDSFKPSDYGIVTKKSNTELNDYLDTLVTKWSKDGSLQKLYDRYKLKPSSHTAD

SEQ ID NO: 97 - protein, 264 aa, Streptococcus pneumoniae Pj-102-94
MKKKFFLSALLISLFGLAAAKPVQADTSIADIQKRGELVVGVKQDVPNFGYKDPKTGTYSGIETDLAKMVADELKVKIRYVPVTAQTRGPLLDNEQVDMDIATFTITDERKKLYNFTSPYYTDASGFLVNKSAKIKKIEDLNSKTIGVAQGSITQCLITELGKKKGLTFKFVELGSYPELITSLHAHRIDAFSVDRSILSGYTSKRTELLDDSFKPSDYGIVTKKSNTELNDYLDNLVTKWSKDGSLQKLYDRYKLKPSSHTAD

SEQ ID NO: 98 - protein, 264 aa, Streptococcus pneumoniae Pj-102-98; identical to SEQ ID NO: 94

SEQ ID NO: 99 - protein, 264 aa, Streptococcus pneumoniae Pj-102-148
MKKKFFLSALLISLFGLAAAKPVQADTSIADIQKRGELVVGVKQDVPNFGYKDPKTGTYSGIETDLAKMVADELKVKIRYVPVTAQTRGPLLDNEQVDMDIATFTITDERKKLYNFTSPYYTDASGFLVNKSAKIKKIEDLNGKTIGVAQSSITQRLITELGKKKGLTFKFVELGSYPELITSLHAHRIDAFSVDRSILSGYTSKRTALLDDSFKPSDYGIVTKKSNTELNDYLDNLVTKWSKDGSLQKLYDRYKLKPSSHTAD

SEQ ID NO: 100 - protein, 264 aa, Streptococcus pneumoniae Pj-102-160
MKKKFFLSALLISLFGLAAAKPVQADTSIADIQKRGELVVGVKQDVPNFGYKDPKTGTYSGIETDLAKMVADELKVKIRYVPVTAQTRGPLLDNEQVDMDIATFTITDERKKLYNFTSPYYTDASGFLVNKSAKIKKIEDLNGKTIGVAQGSITQRLITELGKKKGLKFKFVELGSYPELITSLHAHRIDTFSVDRSILSGYTSKRTALLDDSFKPSDYGIVTKKSNTELNDYLDTLVTKWSKDGSLQKLYDRYKLKPSSHTAD

SEQ ID NO: 101 - protein, 264 aa, Streptococcus pneumoniae Pj-102-161; identical to SEQ ID NO: 100

SEQ ID NO: 102 - protein, 264 aa, Streptococcus pneumoniae Pj-102-163; identical to SEQ ID NO: 97

SEQ ID NO: 103 - protein, 264 aa, Streptococcus pneumoniae Pj-102-228; identical to SEQ ID NO: 96

SEQ ID NO: 104 - protein, 264 aa, Streptococcus pneumoniae Pj-102-386; identical to SEQ ID NO: 94

SEQ ID NO: 105 - protein, 264 aa, Streptococcus pneumoniae Pj-1344
MKKKFFLSALLISLFGLAAAKPVQADTSIADIQKRGELVVGVKQDVPNFGYKDPKTGTYSGIETDLAKMVADELKVKIRYVPVTAQTRGPLLDNEQVDMDIATFTITDERKKLYNFTSPYYTDASGFLVNKSAKIKKIEDLNGKTIGVAQGSITQRLITELGKKKGLKFKFVELGSYPELITSLHAHRIDAFSVDRSILSGYTSKRTELLDDSFKPSDYGIVTKKSNTELNDYLDNLVTKWSKDGSLQKLYDRYKLKPSSHTAD

SEQ ID NO: 106 - protein, 264 aa, Streptococcus pneumoniae Pj-1490; identical to SEQ ID NO: 105

SEQ ID NO: 107 - protein, 264 aa, Streptococcus pneumoniae Pj-1228; identical to SEQ ID NO: 105

SEQ ID NO: 108 - protein, 264 aa, Streptococcus pneumoniae Pj-1229
MKKKFFLSALLISLFSLAAAKPVQADTSIADIQKRGELVVGVKQDVPNFGYKDPKTGTYSGIETDLAKMVADELKVKIRYVPVTAQTRGPLLDNEQVDMDIATFTITDERKKLYNFTSPYYTDASGFLVNKSAKIKKIEDLNGKTIGVAQGSITQRLITELGKKKGLKFKFVELGSYPELITSLHAHRIDTFSVDRSILSGYTSKRTALLDDSFKPSDYGIVTKKSNTELNDYLDNLVTKWSKDGSLQKLYDRYKLKPSSHTAD

SEQ ID NO: 109 - protein, 264 aa, Streptococcus pneumoniae Pj-1230; identical to SEQ ID NO: 95

SEQ ID NO: 110 - protein, 264 aa, Streptococcus pneumoniae Pj-1231; identical to SEQ ID NO: 94

SEQ ID NO: 111 - protein, 264 aa, Streptococcus pneumoniae Pj-1232
MKKKFFLSALLISLFGLVAAKPVQANTSIADIQKRGELVVGVKQDVPNFGYKDPKTGTYSGIETDLAKMVADELKVKIRYVPVTAQTRGPLLDNEQVDMDIATFTITDERKKLYNFTSPYYTDASGFLVNKSAKIKKIEDLNGKTIGVAQGSITQRLITELGKKKGLTFKFVELGSYPELITSLHAHRIDAFSVDRSILSGYTSKRTELLDDSFKPSDYGIVTKKSNTELNDYLDNLVTKWSKDGSLQKLYDRYKLKPSSHTAD

SEQ ID NO: 112 - protein, 264 aa, Streptococcus pneumoniae Pj-1233
MKKKFFLSALLISLFGLAAAKPVQADTSIADIQKRGELVVGVKQDVPNFGYKDPKTGTYSGIETDLAKMVADELKVKIRYVPVTAQTRGPLLDNEQVDMDIATFTITDERKKLYNFTSPYYTDASGFLVNKSAKIKKIEDLNGKTIGVAQGSITQCLITELGKKKGLTFKFVELGSYPELITSLHAHRIDAFSVDRSILSGYTSKRTELLDDSFKPSDYGIVTKKSNTELNDYLDNLVTKWSKDGSLQKLYDRYKLKPSSHTAD

SEQ ID NO: 113 - protein, 264 aa, Streptococcus pneumoniae Pj-1236
MKKKFFLSALLISLFGLAAAKPVQADTSIADIQKRGELVVGVKQDVPNFGYKDPKTGTYSGIETDLAKMVADELKVKIRYVPVTAQTRGPLLDNEQGDMDIATFTITDERKKLYNFTSPYYTDASGFLVNKSAKIKKIEDLNGKTIGVAQGSITQRLITELGKKKGLKFKFVELGSYPELITSLHAHRIDAFSVDRSILSGYTSKRTALLDDSFKPSDYGIVTKKSNTEFNDYLDNLVTKWSKDGSLQKLYDRYKLKPSSHTAD

SEQ ID NO: 114 - protein, 264 aa, Streptococcus pneumoniae Pj-1237; identical to SEQ ID NO: 97

SEQ ID NO: 115 - protein, 264 aa, Streptococcus pneumoniae Pj-1241; identical to SEQ ID NO: 94

SEQ ID NO: 116 - protein, 264 aa, Streptococcus pneumoniae Pj-1242
MKKKFFLSALLISLFGLAAAKPVQADTSIADIQKRGELVVGVKQDVPNFGYKDPKTGTYSGIETDLAKMVADELKVKIRYVPVTAQTRGPLLDNEQVDMDIATFTITDERKKLYNFTSPYYTDASGFLVNKSAKIKKIEDLNGKTIGVAQGSITQRLITELGKKKDLKFKFVELGSYPELITSLHAHRIDAFSVDRSILSGYTNKRTALLDDSFKPSDYGIVTKKSNTELNDYLDNLVTKWSKDGSLQKLYDRYKLKPSSHTAD

SEQ ID NO: 117 - protein, 264 aa, Streptococcus pneumoniae Pj-1248; identical to SEQ ID NO: 113

SEQ ID NO: 118 - protein, 264 aa, Streptococcus pneumoniae Pj-1250
MKKKFFLSALLISLFGLAAAKPVQADTSIADIQKRGELVVGVKQDVPNFGYKDPKTGTYSGIETDLAKMVADELKVKIRYVPVTAQTRAPLLDNEQVDMDIATFTITDERKKLYNFTSPYYTDASGFLVNKSAKIKKIEDLNGKTIGVAQGSITQRLITELGKKKGLKFKFVELGSYPELITSLHAHRIDAFSVDRSILSGYTNKRTALLDDSFKPSDYGIVTKKSNTELNDYLDNLVTKWSKDGSLQKLYDRYKLKPSSHTAD

SEQ ID NO: 119 - protein, 264 aa, Streptococcus pneumoniae Pj-1255; identical to SEQ ID NO: 100

SEQ ID NO: 120 - protein, 264 aa, Streptococcus pneumoniae Pj-1262; identical to SEQ ID NO: 113

SEQ ID NO: 121 - protein, 264 aa, Streptococcus pneumoniae Pj-1279
MKKKFFLSALLISLFGLAAAKPVQADTNIADIQKRGELVVGVKQDVPNFGYKDPKTGTYSGIETDLAKMVADELKVKIRYVPVTAQTRGPLLDNEQVDMDIATFTITDERKKLYNFTSPYYTDASGFLVNKSAKIKKIEDLNGKTIGVAQGSITQRLITELGKKKGLKFKFVELGSYPELITSLHAHRIDTFSVDRSILSGYTSKRTALLDDSFKPSDYGIVTKKSNTELNDYLDNLVTKWSKDGSLQKLYDRYKLKPSSHTAD

SEQ ID NO: 122 - protein, 264 aa, Streptococcus pneumoniae Pj-1283; identical to SEQ ID NO: 94

SEQ ID NO: 123 - protein, 264 aa, Streptococcus pneumoniae Pj-1284; identical to SEQ ID NO: 111

SEQ ID NO: 124 - protein, 264 aa, Streptococcus pneumoniae Pj-1297
MKKKFFLSALLISLFGLAAAKPVQADTSIADIQKRGELVVGVKQDVPNFGYKDPKTGTYSGIETDLAKMVADELKVKIRYVPVTAQTRGPLLDNEQVDMDIATFTITDERKKLYNFTSPYYTDASGFLVNKSAKIKKIEDLNSKTIGVAQSSITQCLITELGKKKGLTFKFVELGSYPELITSLHAHRIDAFSVDRSILSGYTSKRTELLDDSFKPSDYGIVTKKSNTELNDYLDNLVTKWSKDGSLQKLYDRYKLKPSSHTAD

SEQ ID NO: 125 - protein, 264 aa, Streptococcus pneumoniae Pj-1298; identical to SEQ ID NO: 94

SEQ ID NO: 126 - protein, 264 aa, Streptococcus pneumoniae Pj-1300; identical to SEQ ID NO: 94

SEQ ID NO: 127 - protein, 264 aa, Streptococcus pneumoniae Pj-1322
MKKKFFLSALLISLFGLAAAKPVQADTSIADIQKRGELVVDVKQDVPNFGYKDPKTGTYSGIETDLAKMVADELKVKIRYVPVTAQTRGPLLDHEQVDMDIATFTITDERKKLYNFTSPYYTDASGFLVNKSAKIKKIEDLNGKTIGVAQGSITQRLITELGKKKGLTFKFVELGSYPELITSLHAHRIDAFSVDRSILSGYTSKRTELLDDSFKPSDYGIVTKKSNTELNNYLDNLVTKWSKDGSLQKLYGRYKLKPSSHTAD

SEQ ID NO: 128 - protein, 264 aa, Streptococcus pneumoniae Pj-1330; identical to SEQ ID NO: 113

SEQ ID NO: 129 - protein, 264 aa, Streptococcus pneumoniae Pj-1345; identical to SEQ ID NO: 97

SEQ ID NO: 130 - protein, 264 aa, Streptococcus pneumoniae Pj-1369; identical to SEQ ID NO: 111

SEQ ID NO: 131 - protein, 264 aa, Streptococcus pneumoniae Pj-1386; identical to SEQ ID NO: 94

SEQ ID NO: 132 - protein, 264 aa, Streptococcus pneumoniae PBI-71
MKKKFFLSALLISLFGLAAAKPVQADTSIADIQKRGELVVGVKQDVPNFGYKDPKTGTYSGIETDLAKMVADELKVKIRYVPVTAQTRGPLLDNEQVDMDIATFTITDERKKLYNFTSPYYTDASGFLVNKSAKIKKIEDLNGKTIGVAQGSITQRLITELGKKKGLTFKFVELGSYPELITSLHAHRIDAFSVDRSILSGYTNKRTALLDDSFKPSDYGIVTKKSNTELNDYLDNLVTKWSKDGSLQKLYDRYKLKPSSHTAD

SEQ ID NO: 133 - protein, 264 aa, Streptococcus pneumoniae I-33_Andersson
MKKKFFLSALLISLLGLAAAKPVQADTSVADIQKRGELVVGVKQDVPNFGYKDPKTGTYSGIETDLAKMVADELKVKVRYVPVTAQTRGPLLDNEQVDMDIATFTITDERKKLYNFTSPYYTDASGFLVNKSAKIKSIEDLNGKTIGVAQGSITQRLITELGKKKGLKFKFVELGSYPELITSLHAHRIDAFSVDRSILSGYISKRTVLLDDSFKPSDYGIVTKKSNTELNDYLDNLVTKWSKDGSLQKLYDRYKLKPSSHTAD

SEQ ID NO: 134 - protein, 264 aa, Streptococcus pneumoniae Pj-1291_Andersson
MKKKFFLYALLISLFSLTAAKPVQADTSVADIQKRGELVVGVKQDVPNFGYKDPKTGSYSGIETDLAKMIADELKVKVRYVPVTAQTRGPLLDNEQVDMDIATFTITDERKKLYNFTSPYYTDASGFLVNKSANIKSIEDLNGKTIGVAQGSITQRLITELGKKKGLTFKFVELGSYPELITSLHAHRIDAFSVDRSILSGYISKRTELLDDSFKPSDYGIVTKKSNTELNDYFDQLVTKWSKDGSLQKLYDRYKLKPSSHTAD

SEQ ID NO: 135 - protein, 264 aa, Streptococcus pneumoniae TIGR4_DB
MKKKFFLSALLISLFGLAAAKPVQADTSIADIQKRGELVVGVKQDVPNFGYKDPKTGTYSGIETDLAKMVADELKVKIRYVPVTAQTRGPLLDNEQVDMDIATFTITDERKKLYNFTSPYYTDASGFLVNKSAKIKKIEDLNGKTIGVAQGSITQRLITELGKKKGLKFKFVELGSYPELITSLHAHRIDTFSVDRSILSGYTSKRTALLDDSFKPSDYGIVTKKSNTELNDYLDNLVTKWSKDGSLQKLYDRYKLKPSSHTAD

SEQ ID NO: 136 - protein, 264 aa, Streptococcus pneumoniae TIGR4_IC; identical to SEQ ID NO: 135

SEQ ID NO: 137 - protein, 386 aa, Streptococcus pneumoniae Pj-102-62
MKKKFALSFVALASVALLAACGEVKSGAVNTAGNSVEEKTIKIGFNFEESGSLAAYGTAEQKGAQLAVDEINAAGGIDGKQIEVIDKDNKSETAEAASVTTNLVTQSKVSAVVGPATSGATAAAVSNATKAGVPLISPSATQDGLTKGQDYLFIGTFQDSFQGKIISNYVSEKLNAKKVVLYTDNASDYAKGIAKSFRESYKGEIVADETFVAGDTDFQAALTKMKGKDFDAIVVPGYYNEAGKIVNQARGMGIDKPIVGGDGFNGEEFVQQATVEKASNIYFISGFSTTVEVSAKAKAFLDAYRAKYNEEPSTFAALAYDSVHLVANAAKGAKNSGEIKDNLAKTKDFEGVTGQTSFDADHNTVKTAYMMTMNNGKVEAAEVVKP

SEQ ID NO: 138 - protein, 386 aa, Streptococcus pneumoniae Pj-102-70; identical to SEQ ID NO: 137

SEQ ID NO: 139 - protein, 386 aa, Streptococcus pneumoniae Pj-102-77
MKKKFALSFVALASVALLAACGEVKSGAVNTAGNSVEEKTIKIGFNFEESGSLAAYGTAEQKGAQLAVDEINAAGGIDGKQIEVIDKDNKSETAEAASVTTNLVTQSKVSAVVGPATSGATAAAVANATKAGVPLISPSATQDGLTKGQDYLFIGTFQDSFQGKIISNYVSEKLNAKKVVLYTDNASDYAKGIAKSFRESYKGEIVADETFVAGDTDFQAALTKMKGKDFDAIVVPGYYNEAGKIVNQARGMGIDKPIVGGDGFNGEEFVQQATAEKASNIYFISGFSTTVEVSAKAKAFLDAYRAKYNEEPSTFAALAYDSVHLVANAAKGAKNSGEIKDNLAKTKDFEGVTGQTSFDADHNTVKTAYMMTMNNGKVEAAEVVKP

SEQ ID NO: 140 - protein, 386 aa, Streptococcus pneumoniae Pj-102-93
MKKKFALSFVALASVALLAACGEVKSGAVNTAGNSVEEKTIKIGFNFEESGSLAAYGTAEQKGAQLAVDEINAAGGIDGKQIEVIDKDNKSETAEAASVTTNLVTQSKVSAVVGPATSGATAAAVANATKAGVPLISPSATQDGLTKGQDYLFIGTFQDSFQGKIISNYVSEKLNAKKVVLYTDNASDYAKGIAKSFRESYKGEIVADETFVAGDTDFQAALTKMKGRDFDAIVVPGYYNEAGKIVNQARGMGIDKPIVGGDGFNGEEFVQQATAEKASNIYFISGFSTTVEVSAKAKAFLDAYRAKYNEEPSTFAALAYDSVHLVANAAKGAKNSGEIKNNLAKTKDFEGVTGQTSFDADHNTVKTAYMMTMNNGKVEAAEVVKP

SEQ ID NO: 141 - protein, 386 aa, Streptococcus pneumoniae Pj-102-98
MKKKFALSFVALASVALLAACGEVKSGAVNTAGNSVEEKTIKIGFNFEESGSLAAYGTAEQKGAQLAVDEINAAGGIDGKQIEVVDKDNKSETAEAASVTTNLVTQSKVSAVVGPATSGATAAAVANATKAGVPLISPSATQDGLTKGQDYLFIGTFQDSFQGKIISNYVSEKLNAKKVVLYTDNASDYAKGIAKSFRESYKGEIVADETFVAGDTDFQAALTKMKGKDFDAIVVPGYYNEAGKIVNQARGMGIDKPIVGGDGFNGEEFVQQATAEKASNIYFISGFSTTVEVSAKAKAFLDAYRAKYNEEPSTFAALAYDSVHLVANAAKGAKNSGEIKDNLAKTKDFEGVTGQTSFDADHNTVKTAYMMTMNNGKVEAAEVVKP

SEQ ID NO: 142 - protein, 386 aa, Streptococcus pneumoniae Pj-102-148; identical to SEQ ID NO: 141

SEQ ID NO: 143 - protein, 386 aa, Streptococcus pneumoniae Pj-102-160; identical to SEQ ID NO: 141

SEQ ID NO: 144 - protein, 386 aa, Streptococcus pneumoniae Pj-102-161; identical to SEQ ID NO: 140

SEQ ID NO: 145 - protein, 386 aa, Streptococcus pneumoniae Pj-102-386; identical to SEQ ID NO: 141

SEQ ID NO: 146 - protein, 386 aa, Streptococcus pneumoniae Pj-1344
MKKKFALSFVALASVALLAACVEVKSGAVNTAGNSVEEKTIKIGFNFEESGSLAAYGTAEQKGAQLAVDEINAAGGIDGKQIEVVDKDNKSETAEAASVTTNLVTQSKVSAVVGPATSGATAAAVANATKAGVPLISPSATQDGLTKGQDYLFIGTFQDSFQGKIISNYVSEKLNAKKVVLYTDNASDYAKGIAKSFRESYKGEIVADETFVAGDTDFQAALTNMKGKDFDAIVVPGYYNEAGKIVNQARGMGIDKPIVGGDGFNGEEFVQQATAEKASNIYFISGFSTTVEVSAKAKAFLDAYRAKYNEEPSTFAALAYDSVHLVANAAKGAKNSGEIKDNLAKTKDFEGVTGQTSFDADHNTVKTAYMMTMNNGKVEAAEVVKP

SEQ ID NO: 147 - protein, 386 aa, Streptococcus pneumoniae Pj-1490; identical to SEQ ID NO: 146

SEQ ID NO: 148 - protein, 386 aa, Streptococcus pneumoniae Pj-1228; identical to SEQ ID NO: 146

SEQ ID NO: 149 - protein, 386 aa, Streptococcus pneumoniae Pj-1230; identical to SEQ ID NO: 139

SEQ ID NO: 150 - protein, 386 aa, Streptococcus pneumoniae Pj-1231
MKKKFALSFVALASVALLAACGEVKSGAVNTAGNSVEEKTIKIGFNFEESGSLAAYGTAEQKGAQLAVDEINGAGGIDGKQIEVVDKDNKSETAEAASVTTNLVTQSKVSAVVGPATSGATAAAVANATKAGVPLISPSATQDGLTKGQDYLFIGTFQDSFQGKIISNYVSEKLNAKKVVLYTDNASDYAKGIAKSFRESYKGEIVADETFVAGDTDFQAALTKMKGKDFDAIVVPGYYNEAGKIVNQARGMGIDKPIVGGDGFNGEEFVQQATAEKASNIYFISGFSTTVEVSAKAKAFLDAYRAKYNEEPSTFAALAYDSVHLVANAAKGAKNSGEIKNNLAKTKDFEGVTGQTSFDADHNTVKTAYMMTMNNGKVEAAEVVKP

SEQ ID NO: 151 - protein, 386 aa, Streptococcus pneumoniae Pj-1232; identical to SEQ ID NO: 141

SEQ ID NO: 152 - protein, 386 aa, Streptococcus pneumoniae Pj-1233; identical to SEQ ID NO: 139

SEQ ID NO: 153 - protein, 386 aa, Streptococcus pneumoniae Pj-1236; identical to SEQ ID NO: 141

SEQ ID NO: 154 - protein, 386 aa, Streptococcus pneumoniae Pj-1250; identical to SEQ ID NO: 141

SEQ ID NO: 155 - protein, 386 aa, Streptococcus pneumoniae Pj-1255; identical to SEQ ID NO: 141

SEQ ID NO: 156 - protein, 386 aa, Streptococcus pneumoniae Pj-1262; identical to SEQ ID NO: 141

SEQ ID NO: 157 - protein, 386 aa, Streptococcus pneumoniae Pj-1279
MKKKFALSFVALASVALLAACGEVKSGAVNTAGNSVEEKTIKIGFNFEESGSLAAYGTAEQKGAQLAVDEINAAGGIDGKQIEVIDKDNKSETAEAASVTTNLVTQSKVSAVVGPATSGATAVAVANATKAGVPLISPSATQDGLTKGQDYLFIGTFQDSFQGKIISNYVSEKLNAKKVVLYTDNASDYAKGIAKSFRESYKGEIVADETFVAGDTDFQAALTKMKGRDFDAIVVPGYYNEAGKIVNQARGKGIDKPIVGGDGFNGEEFVQQATAEKASNIYFISGFSTTVEVSAKAKAFLDAYRAKYNEEPSTFAALAYDSVHLVANAAKGAKNSGEIKNNLAKTKDFEGVTGQTSFDADHNTVKTAYMMTMNNGKVEAAEVVKP

SEQ ID NO: 158 - protein, 386 aa, Streptococcus pneumoniae Pj-1283
MKKKFALSFVALASVALLAACGEVKSGAVNTAGNSVEEKTIKIGFNFEESGSLAAYGTAEQKGAQLAVDEINAAGGIDGKQIEVVDKDNKSETAEAASVTTNLVTQSKVSAVVGPATSGATAAAVANATKAGVPLISPSATQDGLTKGQDYLFIGTFQDSFQGKIISNYVSEKLNAKKVVLYTDNASDYAKGIAKSFRESYKGEIVADETFVAGDTDFQAALTKMKGKDFDAIVVPGYYNEAGKIVNQARGMGIDKPIVGGDGFNGEEFVQQATAEKASNIYFISGFSTTVEVSAKAKAFLDAYRAKYNEEPSTFAALAYDSVHLVANAAKGAKNSGEIKNNLAKTKDFEGVTGQTSFDADYNTVKTAYMMTMNNGKVEAAEVVKP

SEQ ID NO: 159 - protein, 386 aa, Streptococcus pneumoniae Pj-1284; identical to SEQ ID NO: 141

SEQ ID NO: 160 - protein, 386 aa, Streptococcus pneumoniae Pj-1291; identical to SEQ ID NO: 141

SEQ ID NO: 161 - protein, 386 aa, Streptococcus pneumoniae Pj-1297; identical to SEQ ID NO: 141

SEQ ID NO: 162 - protein, 386 aa, Streptococcus pneumoniae Pj-1298; identical to SEQ ID NO: 150

SEQ ID NO: 163 - protein, 386 aa, Streptococcus pneumoniae Pj-1300
MKKKFALSFVALASVALLAACGEVKSGAVNTAGNSVEEKTIKIGFNFEESGSLAAYGTAEQKGAQLAVDEINAAGGIDGKQIEVVDKDNKSETAEAASVTTNLVTQSKVSAVVGPATSGATAAAVANATKAGVPLISPSATQDGLTKGQDYLFIGTFQDSFQGKIISNYVSEKLNAKKVVLYTDNASDYAKGIAKSFRESYKGEIVADETFVAGDTDFQAALTKMKGKDFDAIVVPGYYNEAGKIVNQARGMGIDKPIVGGDGFNGEEFVQQATAEKASNIYFISGFSTTVEVSAKAKAFLDAYRAKYNEEPSTFAALAYDSVHLVANAAKGAKNSGEIKDSLAKTKDFEGVTGQTSFDADHNTVKTAYMMTMNNGKVEAAEVVKP

SEQ ID NO: 164 - protein, 386 aa, Streptococcus pneumoniae Pj-1322
MKKKFALSFVALASVALLAACGEVKSGAVNTAGNSVEEKTIKIGFNFEESGSLAAYGTAEQKGAQLAVDEINAAGGIDGKQIEVVDKDNKSETAEAASVTTNLVTQSKVSAVVGPATSGATAAAVANATKAGVPLISPSATQDGLTKGQDYLFIGTFQDSFQGKIISNYVSEKLNAKKVVLYTDNASDYAKGIAKSFRESYKGEIVADETFVAGDTDFQAALTKMKGKDFDAIVVPGYYNEAGKIVNQARGMGIDKPIVGGDGFNGEEFVQQATAEKASNIYFISGFSTTVEVSAKAKAFLDAYRAKYNEEPSTFAALAYDSVHLVANAAKGAKNSGEIKNNLAKTKDFEGVTGQTSFDADHNTVKTAYMMTMNNGKVEAAEVVKS

SEQ ID NO: 165 - protein, 386 aa, Streptococcus pneumoniae Pj-1330; identical to SEQ ID NO: 141

SEQ ID NO: 166 - protein, 386 aa, Streptococcus pneumoniae Pj-1345; identical to SEQ ID NO: 141

SEQ ID NO: 167 - protein, 386 aa, Streptococcus pneumoniae Pj-1347; identical to SEQ ID NO: 141

SEQ ID NO: 168 - protein, 386 aa, Streptococcus pneumoniae Pj-1369; identical to SEQ ID NO: 141

SEQ ID NO: 169 - protein, 386 aa, Streptococcus pneumoniae PBI-71; identical to SEQ ID NO: 141

SEQ ID NO: 170 - protein, 386 aa, Streptococcus pneumoniae Pj-1291_Andersson; identical to SEQ ID NO: 141

SEQ ID NO: 171 - protein, 386 aa, Streptococcus pneumoniae TIGR4_DB
MKKKFALSFVALASVALLAACGEVKSGAVNTAGNSVEEKTIKIGFNFEESGSLAAYGTAEQKGAQLAVDEINAAGGIDGKQIEVVDKDNKSETAEAASVTTNLVTQSKVSAVVGPATSGATAAAVANATKAGVPLISPSATQDGLTKGQDYLFIGTFQDSFQGKIISNYVSEKLNAKKVVLYTDNASDYAKGIAKSFRESYKGEIVADETFVAGDTDFQAALTKMKGKDFDAIVVPGYYNEAGKIVNQARGMGIDKPIVGGDGFNGEEFVQQATAEKASNIYFISGFSTTVEVSAKAKAFLDAYRAKYNEEPSTFAALAYDSVHLVANAAKGAKNSGEIKNNLAKTKDFEGVTGQTSFDADHNTVKTAYMMTMNNGKVEAAEVVKP

SEQ ID NO: 172 - protein, 386 aa, Streptococcus pneumoniae TIGR4_IC; identical to SEQ ID NO: 171

SEQ ID NO: 173 - protein, 136 aa, Streptococcus pneumoniae Pj-102-148
VENLTNFYEKYRVYLTRPRLELLAVVTIVFCAVLVFFLNIPGKGVLKLDNGTIVYDGSLVRGKMNGQGTITFQNGDQYTGGFNNGSFNGKGTFQSKEGWTYEGDFVNGQAEGKGKLTTEQEVVYEGTFKQGVFQQK

SEQ ID NO: 174 - protein, 136 aa, Streptococcus pneumoniae Pj-102-161
VENLTNFYEKYRVYLTRPRLEILAVVTIVFCAVLVFFLNIPGKGVLKLDNGTIVYDGSLVRGKMNGQGTITFQNGDQYTGGFNNGAFNGKGTFQSKEGWTYEGDFVNGQAEGKGKLTTEQEVVYEGTFKQGVFQQK

SEQ ID NO: 175 - protein, 136 aa, Streptococcus pneumoniae Pj-1364
VENLTNFYEKYRVYLTRPRLEILTVVTIVFCAVLVFFLNIPGKGVLKLDNGTIVYDGSLVRGKMNGQGTITFQNGDQYTGGFNNGAFNGKGTFQSKEGWTYEGDFVNGQAEGKGKLTTEQEVVYEGTFKQGVFQQK

SEQ ID NO: 176 - protein, 136 aa, Streptococcus pneumoniae Pj-1484; identical to SEQ ID NO: 175

SEQ ID NO: 177 - protein, 136 aa, Streptococcus pneumoniae Pj-1231
VENPTNFYEKYRVYLTRPRLELLAVVTIVFCAVLVFFLNIPGKGVLKLDNGTIVYDGSLVRGKMNGQGTITFQNGDQYTGGFNNGAFNGKGTFQSKEGWTYEGDFVNGQAEGKGKLTTEQEVVYEGTFKQGVFQQK

SEQ ID NO: 178 - protein, 136 aa, Streptococcus pneumoniae Pj-1234; identical to SEQ ID NO: 175

SEQ ID NO: 179 - protein, 136 aa, Streptococcus pneumoniae Pj-1255; identical to SEQ ID NO: 174

SEQ ID NO: 180 - protein, 136 aa, Streptococcus pneumoniae Pj-1284; identical to SEQ ID NO: 175

SEQ ID NO: 181 - protein, 136 aa, Streptococcus pneumoniae Pj-1298; identical to SEQ ID NO: 177

SEQ ID NO: 182 - protein, 136 aa, Streptococcus pneumoniae Pj-1300; identical to SEQ ID NO: 174

SEQ ID NO: 183 - protein, 136 aa, Streptococcus pneumoniae Pj-1322; identical to SEQ ID NO: 177

SEQ ID NO: 184 - protein, 136 aa, Streptococcus pneumoniae I-33_Andersson
MENLKNFYEKYRVYLTRQRLELLAVVTIVFCAVLVFFLNIPGKGVLKLDNGTIVYDGSLVRGKMNGQGTITFQNGDQYTGGFNNGAFNGKGTFQSKEGWTYEGDFVNGQAEGKGKLTTEQEVVYEGTFKQGVFQQK

SEQ ID NO: 185 - protein, 136 aa, Streptococcus pneumoniae TIGR4_DB
VENLTNFYEKYRVYLTRPRLELLAVVTIVFCAVLVFFLNIPGKGVLKLDNGTIVYDGSLVRGKMNGQGTITFQNGDQYTGGFNNGAFNGKGTFQSKEGWTYEGDFVNGQAEGKGKLTTEQEVVYEGTFKQGVFQQK

SEQ ID NO: 186 - protein, 136 aa, Streptococcus pneumoniae TIGR4_IC; identical to SEQ ID NO: 185

SEQ ID NO: 187 - protein, 810 aa, Streptococcus pneumoniae Pj-102-70
MNYSKALNECIESAYMVAGHFGARYLESWHLLIAMSNHSYSVAGATLNDYPYEMDRLEEVALELTETDYSQDETFTELPFSRRLQVLFDEAEYVASVVHAKVLGTEHVLYAILHDSNALATRILERAGFSYEDKKDQVKIAALRRNLEERAGWTREDLKALRQRHRTVADKQNSMANMMGMPQTPSGGLEDYTHDLTEQARSGKLEPVIGRDKEISRMIQILSRKTKNNPVLVGDAGVGKTALALGLAQRIASGDVPAEMAKMRVLELDLMNVVAGTRFRGDFEERMNNIIKDIEEDGQVILFIDELHTIMGSGSGIDSTLDAANILKPALARGTLRTVGATTQEEYQKHIEKDAALSRRFAKVTIEEPSVADSMTILQGLKATYEKHHRVQITDEAVETAVKMAHRYLTSRHLPDSAIDLLDEAAATVQNKAKHVKADDSDLSPADKALMDGKWKQAAQLIAKEEEVPVYKDLVTESDILTTLSRLSGIPVQKLTQTDAKKYLNLEAELHKRVIGQDQAVSSISRAIRRNQSGIRSHKRPIGSFMFLGPTGVGKTELAKALAEVLFDDESALIRFDMSEYMEKFAASRLNGAPPGYVGYEEGGELTEKVRNKPYSVLLFDEVEKAHPDIFNVLLQVLDDGVLTDSKGRKVDFSNTIIIMTSNLGATALRDDKTVGFGAKDIRFDQENMEKRMFEELKKAYRPEFINRIDEKVVFHSLSSDHMQEVVKIMVKPLVASLAEKGIDLKLQASALKLLANQGYDPEMGARPLRRTLQTEVEDKLAELLLKGDLVAGSTLKIGVKAGQLKFDIA

SEQ ID NO: 188 - protein, 810 aa, Streptococcus pneumoniae Pj-102-93
MNYSKALNECIESAYMVAGHFGARYLESWHLLIAMSNHSYSVAGATLNDYPYEMDRLEEVALELTETDYSQDETFTELPFSRRLQVLFDEAEYVASVVHAKVLGTEHVLYAILHDSNALATRILERAGFSYEDKKDQVKIAALRRNLEERAGWTREDLKALRQRHRTVADKQNSMANMMGMPQTPSGGLEDYTHDLTEQARSGKLEPVIGRDKEISRMIQILSRKTKNNPVLVGDAGVGKTALALGLAQRIASGDVPAEMAKMRVLELDLMNVVAGTRFRGDFEERMNNIIKDIEEDGQVILFIDELHTIMGSGSGIDSTLDAANILKPALARGTLRTVGATTQEEYQKHIEKDAALSRRFAKVTIEEPSVADSMTILQGLKATYEKHHRVQITDEAVETAVKMAHRYLTSRHLPDSAIDLLDEAAATVQNKAKYVKADDSDLSPADKALMDGKWKQAAQLIAKEEEVPVYKDLVTESDILTTLSRLSGIPVQKLTQTDAKKYLNLEAELHKRVIGQDQAVSSISRAIRRNQSGIRSHKRPIGSFMFLGPTGVGKTELAKALAEVLFDDESALIRFDMSEYMEKFAASRLNGAPPGYVGYEEGGELTEKVRNKPYSVLLFDEVEKAHPDIFNVLLQVLDDGVLTDSKGRKVDFSNTIIIMTSNLGATALRDDKTVGFGAKDIRFDQENMEKRMFEELKKAYRPEFINRIDEKVVFHSLSSDHMQEVVKIMVKPLVASLAEKGIDLKLQASALKLLANQGYDPEMGARPLRRTLQTEVEDKLAELLLKGDLVAGSTLKIGVKAGQLKFDIA

SEQ ID NO: 189 - protein, 810 aa, Streptococcus pneumoniae Pj-102-161
MNYSKALNECIESAYMVAGHFGARYLESWHLLIAMSNHSYSVAGATLNDYPYEMDRLEEVALELTETDYSQDETFTELPFSRRLQVLFDEAEYVASVVHAKVLGTEHVLYAILHDSNALATRILERAGFSYEDKKDQVKIAALRRNLEERAGWTREDLKALRQRHRTVADKQNSMANMMGMPQTPSGGLEDYTHDLTEQARSGKLEPVIGRDKEISRMIQILSRKTKNNPVLVGDAGVGKTALALGLAQRIASGDVPAEMAKMRVLELDLMNVVAGTRFRGDFEERMNNIIKDIEEDGQVILFIDELHTIMGSGSGIDSTLDAANILKPALARGTLRTVGATTQEEYQKHIEKDAALSRRFAKVTIEEPSVADSMTILQGLKATYEKHHRVQITDEAVETAVKMAHRYLTSRHLPDSAIDLLDEAAATVQNKAKHVKADDSDLSPADKALMDGKWKQAAQLIAKEEEVPVYKDLVTESDILTTLSRLSGIPVQKLTQTDAKKYLNLEAELHKRVIGQDQAVSSISRAIRRNQSGIRSHKRPIGSFMFLGPTGVGKTELAKALAEVLFDDESALIRFDMSEYMEKFAASRLNGAPPGYVGYEEGGELTEKVRNKPYSVLLFDEVEKAHPDIFNVLLQVLDDGVLTDSKGRKVDFSNTIIIMTSNLGATALRDDKTVGFGAKDIRFDQENMEKRMFEELKKAYRPEFINRIDEKVVFHSLSSDHMQEVVKIMVKPLVASLAEKGIDLKLQASALKLLANQGYDPEMGARPLRRTLQTEVEDKLAELLLKGDLVAGNTLKIGVKAGQLKFDIA

SEQ ID NO: 190 - protein, 810 aa, Streptococcus pneumoniae Pj-102-228
MNYSKALNECIESAYMVAGHFGARYLESWHLLIAMSNHSYSVAGATLNDYPYEMDRLEEVALELTETDYSQDETFTELPFSRRLQVLFDEAEYVASVVHAKVLGTEHVLYAILHDGNALATRILERAGFSYEDKKDQVKIAALRRNLEERAGWTREDLKALRQRHRTVADKQNSMANMMGMPQTPSGGLEDYTHDLTEQARSGKLEPVIGRDKEISRMIQILSRKTKNNPVLVGDAGVGKTALALGLAQRIASGDVPAEMAKMRVLELDLMNVVAGTRFRGDFEERMNNIIKDIEEDGQVILFIDELHTIMGSGSGIDSTLDAANILKPALARGTLRTVGATTQEEYQKHIEKDAALSRRFAKVTIEEPSVADSMTILQGLKATYEKHHRVQITDEAVETAVKMAHRYLTSRHLPDSAIDLLDEAAATVQNKSKHVKADDSDLSPADKALMDGKWKQAAQLIAKEEEVPVYKDLVTESDILTTLSRLSGIPVQKLTQTDAKKYLNLEAELHKRVIGQDQAVSSISRAIRRNQSGIRSHKRPIGSFMFLGPTGVGKTELAKALAEALFDDESALIRFDMSEYMEKFAASRLNGAPPGYVGYEEGGELTEKVRNKPYSVLLFDEVEKAHPDIFNVLLQVLDDGVLTDSKGRKVDFSNTIIIMTSNLGATALRDDKTVGFGAKDIRFDQENMEKRMFEELKKAYRPEFINRIDEKVVFHSLSSDHMQEVVKIMVKPLVASLAEKGIDLKLQASALKLLANQVYDPEMGARPLRRTLQTEVEDKLAELLLKGDLVAGSTLKIGVKAGQLKFDIA

SEQ ID NO: 191 - protein, 810 aa, Streptococcus pneumoniae Pj-1364
MNYSKALNECIESAYMVAGHFGARYLESWHLLIAMSNHSYSVAGATLNDYPYEMDRLEEVALELTETDYSQDETFTELPFSRRLQVLFDEAEYVASVVHAKVLGTEHVLYAILHDGNALATRILERAGFSYEDKKDQVKIAALRRNLEERAGWTREDLKALRQRHRTVADKQNSMANMMGMPQTPSGGLEDYTHDLTEQARSGKLEPVIGRDKEISRMIQILSRKTKNNPVLVGDAGVGKTALALGLAQRIASGDVPAEMAKMRVLELDLMNVVAGTRFRGDFEERMNNIIKDIEEDGQVILFIDELHTIMGSGSGIDSTLDAANILKPALARGTLRTVGATTQEEYQKHIEKDAALSRRFAKVTIEEPSVADSMTILQGLKATYEKHHRVQITDEAVETAVKMAHRYLTSRHLPDSAIDLLDEAAATVQNKAKHVKADDSDLSPADKALMDGKWKQAAQLIAKEEEVPVYKDLVTESDILTTLSRLSGIPVQKLTQTDAKKYLNLEAELHKRVIGQDQAVSSISRAIRRNQSGIRSHKRPIGSFMFLGPTGVGKTELAKALAEVLFDDESALIRFDMSEYMEKFAASRLNGAPPGYVGYEEGGELTEKVRNKPYSVLLFDEVEKAHPDIFNVLLQVLDDGVLTDSKGRKVDFSNTIIIMTSNLGATALRDDKTVGFGAKDIRFDQENMEKRMFEELKKAYRPEFINRIDEKVVFHSLSSDHMQEVVKIMVKPLVASLAEKGIDLKLQASALKLLANQGYDPEMGARPLRRTLQTEVEDKLAELLLKGDLVAGNTLKIGVKAGQLKFDIA

SEQ ID NO: 192 - protein, 810 aa, Streptococcus pneumoniae Pj-1484; identical to SEQ ID NO: 189

SEQ ID NO: 193 - protein, 810 aa, Streptococcus pneumoniae Pj-1230
MNYSKALNECIESAYMVAGHFGARYLESWHLLIAMSNHSYSVAGATLNDYPYEMDRLEEVALELTETDYSQDETFTELPFSRRLQVLFDEAEYVASVVHAKVLGTEHVLYAILHDGNALATRILERAGFSYEDKKDQVKIAALRRNLEERAGWTREDLKALRQRHRTVADKQNSMANMMGMPQTPSGGLEDYTHDLTEQARSGKLEPVIGRDKEISRMIQILSRKTKNNPVLVGDAGVGKTALALGLAQRIASGDVPAEMAKMRVLELDLMNVVAGTRFRGDFEERMNNIIKDIEEDGQVILFIDELHTIMGSGSGIDSTLDAANILKPALARGTLRTVGATTQEEYQKHIEKDAALSRRFAKVTIEEPSVADSMTILQGLKATYEKHHRVQITDEAVETAVKMAHRYLTSRHLPDSAIDLLDEAAATVQNKSKHVKADDSDLSPADKALMDGKWKQAAQLIAKEEEVPVYKDLVTESDILTTLSRLSGIPVQKLTQTDAKKYLNLEAELHKRVIGQDQAVSSISRAIRRNQSGIRSHKRPIGSFMFLGPTGVGKTELAKALAEVLFDDESALIRFDMSEYMEKFAASRLNGAPPGYVGYEEGGELTEKVRNKPYSVLLFDEVEKAHPDIFNVLLQVLDDGVLTDSKGRKVDFSNTIIIMTSNLGATALRDDKTVGFGAKDIRFDQENMEKRMFEELKKAYRPEFINRIDEKVVFHSLSSDHMQEVVKIMVKPLVASLAEKGIDLKLQASALKLLANQGYDLEMGARPLRRTLQTEVEDKLAELLLKGDLVAGSTLKIGVKAGQLKFDIA

SEQ ID NO: 194 - protein, 810 aa, Streptococcus pneumoniae Pj-1231
MNYSKALNECIESAYMVAGHFGARYLESWHLLIAMSNHSYSVAGATLNDYPYEMDRLEEVALELTETDYSQDETFTELPFSRRLQVLFDEAEYVASVVHAKVLGTEHVLYAILHDGNALATRILERAGFSYEDKKDQVKIAALRRNLEERAGWTREDLKALRQRHRTVADKQNSMANMMGMPQTPSGGLEDYTHDLTEQARSGKLEPVIGRDKEISRMIQILSRKTKNNPVLVGDAGVGKTALALGLAQRIASGDVPAEMAKMRVLELDLMNVVAGTRFRGDFEERMNNIIKDIEEDGQVILFIDELHTIMGSGSGIDSTLDAANILKPALARGTLRTVGATTQEEYQKHIEKDAALSRRFAKVTIEEPSVADSMTILQGLKATYEKHHRVQITDEAVETAVKMAHRYLTSRHLPDSAIDLLDEAAATVQNKAKHVKADDSDLSPADKALMDGKWKQAAQLIAKEEEVPVYKDLVTESDILTTLSRLSGIPVQKLTQTDAKKYLNLEAELHKRVIGQDQAVSSISRAIRRNQSGIRSHKRPIGSFMFLGPTGVGKTELAKALAEVLFDDESALIRFDMSEYMEKFAASRLNGAPPGYVGYEEGGELTEKVRNKPYSVLLFDEVEKAHPDIFNVLLQVLDDGVLTDSKGRKVDFSNTIIIMTSNLGATALRDDKTVGFGAKDIRFDQENMEKRMFEELKKAYRPEFINRIDEKVVFHSLSSDHMQEVVKIMVKPLVASLAEKGIDLKLQASALKLLANQGYDPEMGARPLRRTLQTEVEDKLAELLLKGDLVAGSTLKIGVKAGQLKFDIA

SEQ ID NO: 195 - protein, 810 aa, Streptococcus pneumoniae Pj-1232
MNYSKALNECIESAYMVAGHFGARYLESWHLLIAMSNHSYSVAGATLNDYPYEMDRLEEVALELTETDYSQDETFTELPFSRRLQVLFDEAEYVASVVHAKVLGTEHVLYAILHDSNALATRILERAGFSYEDKKDQVKIAALRRNLEERAGWTREDLKALRQRHRTVADKQNSMANMMGMPQTPSGGLEDYTHDLTEQARSGKLEPVIGRDKEISRMIQILSRKTKNNPVLVGDAGVGKTALALGLAQRIASGDVPAEMAKMRVLELDLMNVVAGTRFRGDFEERMNNIIKDIEEDGQVILFIDELHTIMGSGSGIDSTLDAANILKPALARGTLRTVGATTQEEYQKHIEKDAALSRRFAKVTIEEPSVADSMTILQGLKATYEKHHRVQITDEAVETAVKMAHRYLTSRHLPDSAIDLLDEAAATVQNKAKHVKADDSDLSPADKALMDGKWKQAAQLIAKEEEVPVYKDLVTESDILTTLSRLSGIPVQKLTQTDAKKYLNLEAELHKRVIGQDQAVSSISRAIRRNQSGIRSHKRPIGSFMFLGPTGVGKTELAKALAEVLFDDESALIRFDMSEYMEKFAASRLNGAPPGYVGYEEGGELTEKVRNKPYSVLLFDEVEKAHPDIFNVLLQVLDDGVLTDSKGRKVDFSNTIIIMTSNLGATALRDDKTVGFGAKDIRFDQENMEKRMFEELKKAYRPEFINRIDEKVAFHSLSSDHMQEVVKIMVKPLVASLAEKGIDLKLQASALKLLANQGYDPEMGARPLRRTLQTEVEDKLAELLLKGDLVAGNTLKIGVKAGQLKFDIA

SEQ ID NO: 196 - protein, 810 aa, Streptococcus pneumoniae Pj-1234
MNYLKALNECIESAYMVAGHFGARYLESWHLLIAMSNHSYSVAGATLNDYPYEMDRLEEVALELTETDYSQDETFTELPFSRRLQVLFDEAEYVASVVHAKVLGTEHVLYAILHDGNALATRILERAGFSYEDKKDQVKIAALRRNLEERAGWTREDLKALRQRHRTVADKQNSMANMMGMPQTPSGGLEDYTHDLTEQARSGKLEPVIGRDKEISRMIQILSRKTKNNPVLVGDAGVGKTALALGLAQRIASGDVPAEMAKMRVLELDLMNVVAGTRFRGDFEERMNNIIKDIEEDGQVILFIDELHTIMGSGSGIDSTLDAANILKPALARGTLRTVGATTQEEYQKHIEKDAALSRRFAKVTIEEPSVADSMTILQGLKATYEKHHRVQITDEAVETAVKMAHRYLTSRHLPDSAIDLLDEAAATVQNKAKHVKADDSDLSPADKALMDGKWKQAAQLIAKEEEVPVYKDLVTESDILTTLSRLSGIPVQKLTQTDAKKYLNLEAELHKRVIGQDQAVSSISRAIRRNQSGIRSHKRPIGSFMFLGPTGVGKTELAKALAEVLFDDESALIRFDMSEYMEKFAASRLNGAPPGYVGYEEGGELTEKVRNKPYSVLLFDEVEKAHPDIFNVLLQVLDDGVLTDSKGRKVDFSNTIIIMTSNLGATALRDDKTVGFGAKDIRFDQENMEKRMFEELKKAYRPEFINRIDEKVVFHSLSSDHMQEVVKIMVKPLVASLAEKGIDLKLQASALKLLANQGYDPEMGARPLRRTLQTEVEDKLAELLLKGDLVAGNTLKIGVKAGQLKFDIA

SEQ ID NO: 197 - protein, 810 aa, Streptococcus pneumoniae Pj-1236
MNYSKALNECIESAYMVAGHFGARYLESWHLLIAMSNHSYSVAGATLNDYPYEMDRLEEVALELTETDYSQDETFTELPFSRRLQVLFDEAEYVASVVHAKVLGTEHVLYAILHDGNALATRILERAGFSYEDKKDQVKIAALRRNLEERAGWTREDLKALRQRHRTVADKQNSMANMMGMPQTPSGGLEDYTHDLTEQARSGKLEPVIGRDKEISRMIQILSRKTKNNPVLVGDAGVGKTALALGLAQRIASGDVPAEMAKMRVLELDLMNVVAGTRFRGDFEERMNNIIKDIEEDGQVILFIDELHTIMGSGSGIDSTLDAANILKPALARGTLRTVGATTQEEYQKHIEKDAALSRRFAKVTIEEPSVADSMTILQGLKATYEKHHRVQITDEAVETAVKMAHRYLTSRHLPDSAIDLLDEAAATVQNKSKHVKADDSDLSPADKALMDGKWKQAAQLIAKEEEVPVYKDLVTESDILTTLSRLSGIPVQKLTQTDAKKYLNLEAELHKRVIGQDQAVSSISRAIRRNQSGIRSHKRPIGSFMFLGPTGVGKTELAKALAEVLFDDESALIRFDMSEYMEKFAASRLNGAPPGYVGYEEGGELTEKVRNKPYSVLLFDEVEKAHPDIFNVLLQVLDDGVLTDSKGRKVDFSNTIIIMTSNLGATALRDDKTVGFGAKDIRFDQENMEKRMFEELKKAYRPEFINRIDEKVVFHSLSSDHMQEVVKIMVKPLVASLAEKGIDLKLQASALKLLANQGYDPEMGARPLRRTLQTEVEDKLAELLLKGDLVAGSTLKIGVKAGQLKFDIA

SEQ ID NO: 198 - protein, 810 aa, Streptococcus pneumoniae Pj-1237
MNYSKALNECIESAYMVAGHFGARYLESWHLLIAMSNHSYSVAGATLNDYPYELDRLEEVALELTETDYSQDETFTELPFSRRLQILFDESEYVASVVHAKVLGTEHVLYAILHDGNALATRILERAGFSYEDKKDQVKIAALRRNLEERAGWTREDLKALRQRHRTVADKQNSMANMMGMPQTPSGGLEDYTHDLTEQARSGKLEPVIGRDKEISRMIQILSRKTKNNPVLVGDAGVGKTALALGLAQRIASGDVPAEMAKMRVLELDLMNVVAGTRFRGDFEERMNNIIKDIEEDGQVILFIDELHTIMGSGSGIDSTLDAANILKPALARGTLRTVGATTQEEYQKHIEKDAALSRRFAKVTIEEPSVADSMTILQGLKATYEKHHRVQITDEAVETAVKMAHRYLTSRHLPDSAIDLLDEAAATVQNKAKHVKADDSDLSPADKALMDGKWKQAAQLIAKEEEVPVYKDLVTESDILTTLSRLSGIPVQKLTQTDAKKYLNLEAELHKRVIGQDQAVSSISRAIRRNQSGIRSHKRPIGSFMFLGPTGVGKTELAKALAEVLFDDESALIRFDMSEYMEKFAASRLNGAPPGYVGYEEGGELTEKVRNKPYSVLLFDEVEKAHPDIFNVLLQVLDDGVLTDSKGRKVDFSNTIIIMTSNLGATALRDDKTVGFGAKDIRFDQENMEKRMFEELKKAYRPEFINRIDEKVVFHSLSSDHMQEVVKIMVKPLVASLAEKCIDLKLQASALKLLANQGYDPEMGARPLRRTLQTEVEDKLAELLLKGDLVAGSTLKIGVKAGQLKFDIA

SEQ ID NO: 199 - protein, 810 aa, Streptococcus pneumoniae Pj-1241
MNYSKALNECIESAYMVAGHFGARYLESWHLLIAMSNHSYSVAGATLNDYPYEMDRLEEVALELTETDYSQDETFTELPFSRRLQVLFDEAEYVASVVHAKVLGTEHVLYAILHDGNALATRILERAGFSYEDKKDQVKIAALRRNLEERAGWTREDLKALRQRHRTVADKQNSMANMMGMPQTPSGGLEDYTHDLTEQARSGKLEPVIGRDKEISRMIQILSRKTKNNPVLVGDAGVGKTALALGLAQRIASGDVSAEMAKMRVLELDLMNVVAGTRFRGDFEERMNNIIKDIEEDGQVILFIDELHTIMGSGSGIDSTLDAANILKPALARGTLRTVGATTQEEYQKHIEKDAALSRRFAKVTIEEPSVADSMTILQGLKATYEKHHRVQITDEAVETAVKMAHRYLTSRHLPDSAIDLLDEAAATVQNKAKHVKADDSDLSPADKALMDGKWKQAAQLIAKEEEVPVYKDLVTESDILTTLSRLSGIPVQKLTQTDAKKYLNLEAELHKRVIGQDQAVSSISRAIRRNQSGIRSHKRPIGSFMFLGPTGVGKTELAKALAEVLFDDESALIRFDMSEYMEKFAASRLNGAPPGYVGYEEGGELTEKVRNKPYSVLLFDEVEKAHPDIFNVLLQVLDDGVLTDSKGRKVDFSNTIIIMTSNLGATALRDDKTVGFGAKDIRFDQENMEKRMFEELKKAYRPEFINRIDEKVVFHSLSSDHMQEVVKIMVKPLVASLAEKGIDLKLQASALKLLANQGYDPEMGARPLRRTLQTEVEDKLAELLLKGDLVAGSTLKIGVKAGQLKFDIA

SEQ ID NO: 200 - protein, 810 aa, Streptococcus pneumoniae Pj-1250
MNYSKALNECIESAYMVAGHFGARYLESWHLLIAMSNHSYSVAGATLNDYPYEMDRLEEVALELTETDYSQDETFTELPFSRRLQVLFDEAEYVASVVHAKVLGTEHVFYAILHDGNALATRILERAGFSYEDKKDQVKIAALRRNLEERAGWTREDLKALRQRHRTVADKQNSMANMMGMPQTPSGGLEDYTHDLTEQARSGKLEPVIGRDKEISRMIQILSRKTKNNPVLVGDAGVGKTALALGLAQRIASGDVPAEMANMRVLELDLMNVVAGTRFRGDFEERMNNIIKDIEEDGQVILFIDELHTIMGSGSGIDSTLDAANILKPALARGTLRTVGATTQEEYQKHIEKDAALSRRFAKVTIEEPSVADSMTILQGLKATYEKHHRVQITDEAVETAVKMAHRYLTSRHLPDSAIDLLDEAAATVQNKAKYVKADDSDLSPADKALMDGKWKQAAQLIAKEEEVPVYKDLVTESDILTTLSRLSGIPVQKLTQTDAKKYLNLEAELHKRVIGQDQAVSSISRAIRRNQSGIRSHKRPIGSFMFLGPTGVGKTELAKALAEVLFDDESALIRFDMSEYMEKFAASRLNGAPPGYVGYEEGGELTEKVRNKPYSVLLFDEVEKAHPDIFNVLLQVLDDGVLTDSKGRKVDFSNTIIIMTSNLGATALRDDKTVGFGAKDIRFDQENMEKRMFEELKKAYRPEFINRIDEKVVFHSLSSDHMQEVVKIMVKPLVASLAEKGIDLKLQASALKLLANQGYDPEMGARPLRRTLQTEVEDKLAELLLKGDLVAGSTLKIGVKAGQLKFDIA

SEQ ID NO: 201 - protein, 810 aa, Streptococcus pneumoniae Pj-1262; identical to SEQ ID NO: 197

SEQ ID NO: 202 - protein, 810 aa, Streptococcus pneumoniae Pj-1283; identical to SEQ ID NO: 194

SEQ ID NO: 203 - protein, 810 aa, Streptococcus pneumoniae Pj-1284
MNYSKALNECIESAYMVAGHFGARYLESWHLLIAMSNHSYSVAGATLNDYPYEMDRLEEVALELTETDYSQDETFTELPFSRRLQVLFDEAEYVASVVHAKVLGTEHVFYAILHDGNALATRILERAGFSYEDKKDQVKIAALRRNLEERAGWTREDLKALRQRHRTVADKQNSMANMMGMPQTPSGGLEDYTHDLTEQARSGKLEPVIGRDKEISRMIQILSRKTKNNPVLVGDAGVGKTALALGLAQRIASGDVPAEMAKMRVLELDLMNVVAGTRFRGDFEERMNNIIKDIEEDGQVILFIDELHTIMGSGSGIDSTLDAANILKPALARGTLRTVGATTQEEYQKHIEKDAALSRRFAKVTIEEPSVADSMTILQGLKATYEKHHRVQITDEAVETAVKMAHRYLTSRHLPDSAIDLLDEAAATVQNKAKHVKADDSDLSPADKALMDGKWKQAAQLIAKEEEVPVYKDLVTESDILTTLSRLSGIPVQKLTQTDAKKYLNLEAELHKRVIGQDQAVSSISRAIRRNQSGIRSHKRPIGSFMFLGPTGVGKTELAKALAEVLFDDESALIRFDMSEYMEKFAASRLNGAPPGYVGYEEGGELTEKVRNKPYSVLLFDEVEKAHPDIFNVLLQVLDDGVLTDSKGRKVDFSNTIIIMTSNLGATALRDDKTVGFGAKDIRFDQENMEKRMFEELKKAYRPEFINRIDEKVVFHSLSSDHMQEVVKIMVKPLVASLAEKGIDLKLQASALKLLANQGYDPEMGARPLRRTLQTEVEDKLAELLLKGDLVAGSTLKIGVKAGQLKFDIA

SEQ ID NO: 204 - protein, 810 aa, Streptococcus pneumoniae Pj-1291; identical to SEQ ID NO: 194

SEQ ID NO: 205 - protein, 810 aa, Streptococcus pneumoniae TIGR4_IC
MNYSKALNECIESAYMVAGHFGARYLESWHLLIAMSNHSYSVAGATLNDYPYEMDRLEEVALELTETDYSQDETFTELPFSRRLQVLFDEAEYVASVVHAKVLGTEHVLYAILHDSNALATRILERAGFSYEDKKDQVKIAALRRNLEERAGWTREDLKALRQRHRTVADKQNSMANMMGMPQTPSGGLEDYTHDLTEQARSGKLEPVIGRDKEISRMIQILSRKTKNNPVLVGDAGVGKTALALGLAQRIASGDVPAEMAKMRVLELDLMNVVAGTRFRGDFEERMNNIIKDIEEDGQVILFIDELHTIMGSGSGIDSTLDAANILKPALARGTLRTVGATTQEEYQKHIEKDAALSRRFAKVTIEEPSVADSMTILQGLKATYEKHHRVQITDEAVETAVKMAHRYLTSRHLPDSAIDLLDEAAATVQNKAKHVKADDSDLSPADKALMDGKWKQAAQLIAKEEEVPVYKDLVTESDILTTLSRLSGIPVQKLTQTDAKKYLNLEAELHKRVIGQDQAVSSISRAIRRNQSGIRSHKRPIGSFMFLGPTGVGKTELAKALAEVLFDDESALIRFDMSEYMEKFAASRLNGAPPGYVGYEEGGELTEKVRNKPYSVLLFDEVEKAHPDIFNVLLQVLDDGVLTDSKGRKVDFSNTIIIMTSNLGATALRDDKTVGFGAKDIRFDQENMEKRMFEELKKAYRPEFINRIDEKVVFHSLSSDHMQEVVKIMVKPLVASLTEKGIDLKLQASALKLLANQGYDPEMGARPLRRTLQTEVEDKLAELLLKGDLVAGSTLKIGVKAGQLKFDIA

SEQ ID NO: 206 - protein, 392 aa, Streptococcus pneumoniae CDC 3
MKKKILASLLLSTVMVSQVAVLTTAHAETTDDKIAAQDNKISNLTAQQQEAQKQVDQIQEQVSAIQAEQSNLQAENDRLQAESKKLEGEITELSKNIVSRNQSLEKQARSAQTNGAVTSYINTIVNSKSITEAISRVAAMSEIVSANNKMLEQQKADKKAISEKQVANNNAINTVIANQQKLADDAQALTTKQAELKAAELSLAAEKATAEGEKASLLEQKAAAEAEARAAAVAEAAYKEKRASQQQSVLASANTNLTAQVQAVSESAAAPVRAKVRPTYSTNASSYPIGECTWGVKTLAPWAGDYWGNGAQWATSAAAAGFRTGSTPQVGAIACWNDGGYGHVAVVTAVESTTRIQVSESNYAGNRTIGNHRGWFNPTTTSEGFVTYIYAD

SEQ ID NO: 207 - protein, 392 aa, Streptococcus pneumoniae CDC 11
MKKKILASLLLSTVMVSQVAVLTTAHAETTDDKIAAQDNKISNLTAQQQEAQKQVDQIQEQVSAIQAEQSNLQAENDRLQAESKKLEGEITELSKNIVSRNQSLEKQARSAQTNGAVTSYINTIVNSKSITEAISRVAAMSEIVSANNKMLEQQKADKKAISEKQVANNDAINTVIANQQKLADDAQALTTKQAELKAAELSLAAEKATAEGEKASLLEQKAAAEAEARAAAVAEAAYKEKRASQQQSVLASANTNLTAQVQAVYESAAAPVRAKVRPTYSTNASSYPIGECTWGVKTLAPWAGDYWGNGAQWATSAAAAGFRTGSTPQVGAIACWNDGGYGHVAVVTAVESTTRIQVSESNYAGNRTIGNHRGWFNPTTTSEGFVTYIYAD

SEQ ID NO: 208 - protein, 392 aa, Streptococcus pneumoniae CDC 24
MKKKILASLLLSTVMVSQVAVLTTAHAETTDDKIAAQDNKISNLTAQQQEAQKQVDQIQEQVSAIQAEQSNLQAENDRLQAESKKLESEITELSKNIVSRNQSLEKQARSAQTNGAVTSYINTIVNSKSITEAISRVAAMSEIVSANNKMLEQQKADKKAISEKQVANNDAINTVIANQQKLADDAQALTTKQAELKAAELSLAAEKATAEGEKASLLEQKAAAEAEARAAAVAEAAYKEKRASQQQSVLASANTNLTAQVQAVSESAAAPVRAKVRPTYSTNASSYPIGECTWGVKTLAPWAGDYWGNGAQWATSAAAAGFRTGSTPQVGAIACWNDGGYGHVAVVTAVESTTRIQVSESNYAGNRTIGNHRGWFNPTTTSEGFVTYIYAD

SEQ ID NO: 209 - protein, 392 aa, Streptococcus pneumoniae CDC 25
MKKKILASLLLSTVMVSQVAVLTTAHAETTDDKIAAQDNKISNLTAQQQEAQKQVDQIQEQVSAIQAEQSNLQAENDRLQAESKKLEGEITELSKNIVSRNQSLEKQARSAQTNGAVTSYINTIVNSKSITEVISRVAAMSEIVSANNKMLEQQKADKKAISEKQVANNDAINTVIANQQKLADDAQALTTKQAELKAAELSLAAEKATAEGEKASLLEQKAAAEAEARAAAVAEAAYKEKRASQQQSVLASANTNLTAQVQAVSESAAAPVRAKVRPTYSTNASSYPIGECTWGVKTLAPWAGDYWGNGAQWATSAAAAGFRTGSTPQVGAIACWNDGGYGHVAVVTAVESTTRIQVSESNYAGNRTIGNHRGWFNPTTTSEGFVTYIYAD

SEQ ID NO: 210 - protein, 392 aa, Streptococcus pneumoniae CDC 27; identical to SEQ ID NO: 208

SEQ ID NO: 211 - protein, 392 aa, Streptococcus pneumoniae CDC 49
MKKKILASLLLSTVMVSQVAVLTTAHAETTDDKIAAQDNKISNLTAQQQEAQKQVDQIQEQVSAIQAEQSNLQAENDRLQAESKKLEGEITELSKNIVSRNQSLEKQARSAQTNGAVTSYINTIVNSKSITEAISRVAAMSEIVSANNKMLEQQKADKKAISEKQVANNDAINTVIANQQKLADDAQALTTKQAELKAAELSLAAERATAEGEKASLLEQKAAAEAEARAAAVAEAAYKEKRASQQQSVLASANTNLTAQVQAVSESAAAPVRAKVRPTYSTNASSYPIGECTWGVKTLAPWAGDYWGNGAQWATSAAAAGFRTGSTPQVGAIACWNDGGYGHVAVVTAVESTTRIQVSESNYAGNRTIGNHRGWFNPTTTSEGFVTYIYAD

SEQ ID NO: 212 - protein, 392 aa, Streptococcus pneumoniae CDC 56
MKKKILASLLLSTVMVSQVAVLTTAHAETTDDKIAAQDNKISNLTAQQQEAQKQVDQIQEQVSAIQAEQSNLQAENDRLQAESKKLEGEITELSKNIVSRNQSLEKQARSAQTNGAVTSYINTIVNSKSITEAISRVAAMSEIVSANNKMLEQQKADKKAISEKQVANNDAINIVIANQQKLADDAQALTTKQAELKAAELSLAAEKATAEGEKASLLEQKAAAEAEARAAAVAEAAYKEKRASQQQSVLASANTNLTAQVQAVSESAAAPVRAKVRPTYSTNASSYPIGECTWGVKTLAPWAGDYWGNGAQWATSAAAAGFRTGSTPQVGAIACWNDGGYGHVAVVTAVESTTRIQVSESNYAGNRTIGNHRGWFNPTTTSEGFVTYIYAD

SEQ ID NO: 213 - protein, 392 aa, Streptococcus pneumoniae CDC 61
MKKKILASLLLSTVMVSQVAVLTTAHAETTDDKIAAQDNKISNLTAQQQEAQKQVDQIQEQVSAIQAEQSNLQAENDRLQAESKKLEGEITELSKNIVSRNQSLEKQARSAQTNGAVTSYINTIVNSKSITEAISRVAAMSEIVSANNKMLEQQKADKKAISEKQVANNDAINTVIANQQKLADDAQALTTKQAELKAAELSLAAEKATAEGEKASLLEQKAAAEAEARAAAVAEAAYKEKRASQQQSVLASANTNLTAQVQAVSESAAAPVRAKVRPTYSTNASSYPIGECTWGVKTLAPWAEDYWGNGAQWATSAAAAGFRTGSTPQVGAIACWNDGGYGHVAVVTAVESTTRIQVSESNYAGNRTIGNHRGWFNPTTTSEGFVTYIYAD

SEQ ID NO: 214 - protein, 392 aa, Streptococcus pneumoniae CDC 97
MKKKILASLLLSTVMVSQVAVLTTAHAETTDDKIAAQDNKISNLTAQQQEAQKQVDQIQEQVSAIQAEQSNLQAENDRLQAESKKLEGEITELSKNIVSRNQSLEKQARSAQTNGAVTSYINTIVNSKSITEAISRVAAMSEIVSANNKMLEQQKADKKAISEKQVANNDAINTVIANQQKLADDAQALTTKQAELKAAELSLAAEKATAEGEKASLLEQKAAAEAEARAAAVAEAAYKEKRASQQQSVLASANTNLTAQVQAVSESAAAPVRAKVRPTYSTNASSYPIGECTWGVKTLAPWAGDYWGNGGQWATSAAAAGFRTGSTPQVGAIACWNDGGYGHVAVVTAVESTTRIQVSESNYAGNRTIGNHRGWFNPTTTSEGFVTYIYAD

SEQ ID NO: 215 - protein, 391 aa, Streptococcus pneumoniae CDC 103
MKKKILASLLLSTVMVSQVAVLTTAHAETTDDKIAAQDNKISNLTAQQQEAQKQVDQIQEQVSAIQAEQSNLQAENDRLQAESKKLEGEITELSKNIVSRNQSLEKQARSAQTNGAVTSYINTIVNSKSITEAISRVAAMSEIVSANNKMLEQQKADKKAISEKQVANNDAINTVIANQQKLADDAQALTTKQAELKAAESLAAEKATAEGEKASLLEQKAAAEAEARAAAAAEAAYKEKQASQQQSVLASGNTNLTAQVQAVSESAVAPVQAKVRPTYNTDASTYPIGECTWGVKTLAPWAGDYWGNGAQWATSAAAAGFRTGSTPQVGAIACWNDGGYGHVAVVTAVESTTRIQVSESNYAGNRTIGNHRGWFNPTTTSEGFVTYIYAD

SEQ ID NO: 216 - protein, 392 aa, Streptococcus pneumoniae CDC 106
MKKKILASLLLSTVMVSQVAVLTTAHAETTDDKIAAQDNKISNLTAQQQEAQKQVDQIQEQVSAIQAEQSNLQAENDRLQAESKKLEGEITELSKNIVSRNQSLEKQARSAQTNGAVTSYINTIVNSKSITEAISRVAAMSEIVSANNKMLEQQKADKKAISEKQVANNDAINTVIANQQKLADDAQALTTKQAELKAAELSLAAEKATAEGEKASLLEQKAAAEAEARAAAVAEAAYKEKRASQQQSVLASANTNLTAQVQAVSESAAAPVRAKVRPTYSTNASSYPIGECTWGVKTLAPWAGDYWGNGAQWATSAAAAGFRTGSTPQVGAIACWNDGGYGHVAVVTAVESTTRIQVSESNYSGNRTIGNHRGWFNPTTTSEGFVTYIYAD

SEQ ID NO: 217 - protein, 392 aa, Streptococcus pneumoniae CDC 112; identical to SEQ ID NO: 207

SEQ ID NO: 218 - protein, 392 aa, Streptococcus pneumoniae Pj-1280
MKKKILASLLLSTVMVSQVAVLTTAHAETTDDKIAAQDNKISNLTAQQQEAQKQVDQIQEQVSAIQAEQSNLQAENDRLQAESKKLEGEITELSKNIVSRNQSLEKQARSAQTNGAVTSYINTIVNSKSITEAISRVAAMSEIVSANNKMLEQQKADKKAISEKQVANNDAINTVIANQQKLADDAQALTTKQAELKAAELSLAAEKATAEGEKASLLEQKAAAEAEARAAAVAEAAYKEKRSSQQQSVLASANTNLTAQVQAVSESAAAPVRAKVRPTYSTNASSYPIGECTWGVKTLAPWAGDYWGNGAQWATSAAAAGFRTGSTPQVGAIACWNDGGYGHVAVVTAVESTTRIQVSESNYAGNRTIGNHRGWFNPTTTSEGFVTYIYAD

SEQ ID NO: 219 - protein, 659 aa, Streptococcus pneumoniae CDC 1
MIQIGKIFAGRYRIVKQIGRGGMADVYLAKDLILDGEEVAVKVLRTNYQTDPIAVARFQREARAMADLDHPHIVRITDIGEEDGQQYLAMEYVAGLDLKRYIKEHYPLSNEEAVRIMGQILLAMRLAHTRGIVHRDLKPQNILLTPDGTAKVTDFGIAVAFAETSLTQTNSMLGSVHYLSPEQARGSKATVQSDIYAMGIIFYEMLTGHIPYDGDSAVTIALQHFQKPLPSVIAENPSVPQALENVIIKATAKKLTNRYRSVSEMYVDLSSSLSYNRRNESKLIFDETSKADTKTLPKVSQSTLTSIPKVQAQTEHKSIKNPSQAVTEETYQPQAPKKHRFKMRYLILLASLVLVAASLIWILSRTPATIAIPDVAGQTVAEAKATLKKANFEIGEEKTEASEKVEEGRIIRTDPGAGTGRKEGTKINLVVSSGKQSFQISNYVGRKSSDVIAELKEKKVPDNLIKIEEEESNESEAGTVLKQSLPEGTTYDLSKATQIVLTVAKKATTIQLGNYIGRNSTEVISELKQKKVPENLIKIEEEESSESEPGTIMKQSPGAGTTYDVSKPTQIVLTVAKKVTSVAMPSYIGSSLEFTKNNLIQIVGIKEANIEVVEVTTAPAGSAEGMVVEQSPRAGEKVDLNKTRVKISIYKPKTTSATP

SEQ ID NO: 220 - protein, 659 aa, Streptococcus pneumoniae CDC 2; identical to SEQ ID NO: 219

SEQ ID NO: 221 - protein, 659 aa, Streptococcus pneumoniae CDC 3
MIQIGKIFAGRYRIVKQIGRGGMADVYLAKDLILDGEEVAVKVLRTNYQTDPIAVARFQREARAMADLDHPHIVRITDIGEEDGQQYLAMEYVAGLDLKRYIKEHYPLSNEEAVRIMGQILLAMRLAHTRGIVHRDLKPQNILLTPDGTAKVTDFGIAVAFAETSLTQTNSMLGSVHYLSPEQARGSKATVQSDIYAMGIIFYEMLTGHIPYDGDSAVTIALQHFQKPLPSVIAENPSVPQALENVIIKATAKKLTNRYRSVSEMYVDLSSSLSYNRRNESKLIFDETSKADTKTLPKVSQSTLTSIPKVQAQTEHKSIKNPSQAVTEETYQPQAPKKHRFKMRYLILLASLVLVAASLIWILSRTPATIAIPDVAGQTVAEAKATLKKANFEIGEEKTEASEKVEEGRIIRTDPGAGTGRKEGTKINLVVSSGKQSFQISNYVGRKSSDVISELKEKKVPDNLIKIEEEESNESEAGTVLKQSLPEGTTYDLSKATQIVLTVAKKATTIQLGNYIGRNSTEVISELKQKKVPENLIKIEEEESSESEPGTIMKQSPGAGTTYDVSKPTQIVLTVAKKVTSVAMPSYIGSSLEFTKNNLIQIVGIKEANIEVVEVTTAPAGSVEGMVVEQSPRAGEKVDLNKTRVKISIYKPKTTSATP

SEQ ID NO: 222 - protein, 659 aa, Streptococcus pneumoniae CDC 4; identical to SEQ ID NO: 221

SEQ ID NO: 223 - protein, 659 aa, Streptococcus pneumoniae CDC 5
MIQIGKIFAGRYRIVKQIGRGGMADVYLAKDLILDGEEVAVKVLRTNYQTDPIAVARFQREARAMADLDHPHIVRITDIGEEDGQQYLAMEYVAGLDLKRYIKEHYPLSNEEAVRIMGQILLAMRLAHTRGIVHRDLKPQNILLTPDGTAKVTDFGIAVAFAETSLTQTNSMLGSVHYLSPEQARGSKATVQSDIYAMGIIFYEMLTGHIPYDGDSAVTIALQHFQKPLPSVIAENPSVPQALENVIIKATAKKLTNRYRSVSEMYVDLSSSLSYNRRNESKLIFDETSKADTKTLPKVSQSTLTSIPKVQAQTEHKSIKNPSQAVTEETYQPQAPKKHRFKMRYLILLASLVLVAASLIWILSRTPATIAIPDVAGQTVAEAKATLKKANFEIGEEKTEASEKVEEGRIIRTDPGAGTGRKEGTKINLVVSSGKQSFQISNYVGRKSSDVIAELKEKKVPDNLIKIEEEESNESEAGTVLKQSLPEGTTYDLSKATQIVLTVAKKATTIQLGNYIGRNSTEVISELKQKKVPENLIKIEEEESSESEPGTIMKQSPGAGTTYDVSKPTQIVLTVAKKVTSVAMPSYIGSSLEFTKNNLIQIVGIKEANIEVVEVTTAPAGSVEGMVVEQSPRTGEKVDLNKTRVKISIYKPKTTSATP

SEQ ID NO: 224 - protein, 659 aa, Streptococcus pneumoniae CDC 8
MIQIGKIFAGRYRIVKQIGRGGMADVYLAKDLILDGEEVAVKVLRTNYQTDPIAVARFQREARAMADLDHPHIVRITDIGEEDGQQYLAMEYVAGLDLKRYIKEHYPLSNEEAVRIMGQILLAMRLAHTRGIVHRDLKPQNILLTPDGTAKVTDFGIAVAFAETSLTQTNSMLGSVHYLSPEQARGSKATVQSDIYAMGIIFYEMLTGHIPYDGDSAVTIALQHFQKPLPSVIAENPSVPQALENVIIKATAKKLTNRYRSVSEMYVDLSSSLSYNRRNESKLIFDETSKADTKILPKVSQSTLTSIPKVQAQTEHKSIKNPSQAVTEETYQPQAPKKHRFKMRYLILLASLVLVAASLIWILSRTPATIAIPDVAGQTVAEAKATLKKANFEIGEEKTEASEKVEEGRIIRTDPGAGTGRKEGTKINLVVSSGKQSFQISNYVGRKSSDVIAELKEKKVPDNLIKIEEEESNESEAGTVLKQSLPEGTTYDLSKATQIVLTVAKKATTIQLGNYIGRNSTEVISELKQKKVPENLIKIEEEESSESEPGTIMKQSPGAGTTYDVSKPTQIVLTVAKKVTSVAMPSYIGSSLEFTKNNLIQIVGIKEANIEVVEVTTAPAGSVEGMVVEQSPRAGEKVDLNKTRVKISIYKPKTTSATP

SEQ ID NO: 225 - protein, 659 aa, Streptococcus pneumoniae CDC 11; identical to SEQ ID NO: 219

SEQ ID NO: 226 - protein, 659 aa, Streptococcus pneumoniae CDC 13
MIQIGKIFAGRYRIVKQIGRGGMADVYLAKDLILDGEEVAVKVLRTNYQTDPIAVARFQREARAMADLDHPHIVRITDIGEEDGQQYLAMEYVAGLDLKRYIKEHYPLSNEEAVRIMGQILLAMRLAHTRGIVHRDLKPQNILLTPDGTAKVTDFGIAVAFAETSLTQTNSMLGSVHYLSPEQARGSKATVQSDIYAMGIIFYEMLTGHIPYDGDSAVTIALQHFQKPLPSVIAENPSVPQALENVIIKATAKKLTNRYRSVSEMYVDLSSSLSYNRRNESKLIFDETSKADTKTLPKVSQSTLTSIPKVQAQTEHKSIKNPSQAVTEETYQPQAPKKHRFKMRYLILLASLVLVAASLIWILSRTPATIAIPDVAGQTVAEAKATLKKANFEIGEEKTEASEKVEEGRIIRTDPGAGTGRKEGTKINLVVSSGKQSFQISNYVGRKSSDVIAELKEKKVPDNLIKIEEEESNESEAGTVLKQSLPEGTTYDLSKATQIILTVAKKATTIQLGNYIGRNSTEVISELKQKKVPENLIKIEEEESSESEPGTIMKQSPGAGTTYDVSKPTQIVLTVAKKVTSVAMPSYIGSSLEFTKNNLIQIVGIKEANIEVVEVTTAPAGSAEGMVVEQSPRAGEKVDLNKTRVKISIYKPKTTSATP

SEQ ID NO: 227 - protein, 659 aa, Streptococcus pneumoniae CDC 16; identical to SEQ ID NO: 226

SEQ ID NO: 228 - protein, 659 aa, Streptococcus pneumoniae CDC 17
MIQIGKIFAGRYRIVKQIGRGGMADVYLAKDLILDGEEVAVKVLRTNYQTDPIAVARFQREARAMADLDHPHIVRITDIGEEDGQQYLAMEYVAGLDLKRYIKEHYPLSNEEAVRIMGQILLAMRLAHTRGIVHRDLKPQNILLTPDGTAKVTDFGIAVAFAETSLTQTNSMLGSVHYLSPEQARGSKATVQSDIYAMGIIFYEMLTGHIPYDGDSAVTIALQHFQKPLPSVIAENPSVPQALENVIIKATAKKLTNRYRSVSEMYVDLSSSLSYNRRNESKLIFDETSKADTKTLPKVSQSTLTSIPKVQAQTEHKSIKTPSQAVTEETYQPQAPKKHRFKMRYLILLASLVLVAASLIWILSRTPATIAIPDVAGQTVAEAKATLKKANFEIGEEKTEASEKVEEGRIIRTDPGAGTGRKEGTKINLVVSSGKQSFQISNYVGRKSSDVIAELKEKKVPDNLIKIEEEESNESEAGTVLKQSLPEGTTYDLSKATQIVLTVAKKATTIQLGNYIGRNSTEVISELKQKKVPENLIKIEEEESSESEPGTIMKQSPGAGTTYDVSKPIQIVLTVAKKVTSVAMPSYIGSSLEFTKNNLIQIVGIKEANIEVVEVTTAPAGSAEGMVVEQSPRAGEKVDLNKTRVKISIYKPKTTSATP

SEQ ID NO: 229 - protein, 659 aa, Streptococcus pneumoniae CDC 18; identical to SEQ ID NO: 219

SEQ ID NO: 230 - protein, 659 aa, Streptococcus pneumoniae CDC 19
MIQIGKIFAGRYRIVKQIGRGGMADVYLAKDLILDGEEVAVKVLRTNYQTDPIAVARFQREARAMADLDHPHIVRITDIGEEDGQQYLAMEYVAGLDLKRYIKEHYPLSNEEAVRIMGQILLAMRLAHARGIVHRDLKPQNILLTPDGTAKVTDFGIAVAFAETSLTQTNSMLGSVHYLSPEQARGSKATFQSDIYAMGIIFYEMLTGHIPYDGDSAVTIALQHFQKPLPSVIAENPSVPQALENVIIKATAKKLTNRYRSVSEMYVDLSSSLSYNRRNESKLIFDETSKADTKTLPKVSQSTLTSIPKVQAQTEHKSIKNPSQAVTEETYQPQAPKKHRFKMRYLILLASLVLVAASLIWILSRTPATIAIPDVAGQTVAEAKATLKKANFEIGEEKTEASEKVEEGRIIRTDPGAGTGRKEGTKINLVVSSGKQSFQISNYVGRKSSDVIAELKEKKVPDNLIKIEEEESNESEAGTVLKQSLPEGTTYDLSKATQIVLTVAKKATTIQLGNYIGRNSTEVISELKQKKVPENLIKIEEEESSESEPGTIMKQSPGAGTTYDVSKPTQIVLTVAKKVTSVAMPSYIGSSLEFTKNNLIQIVGIKEANIEVVEVTTAPAGSAEGMVVEQSPRAGEKVDLNKTRVKISIYKPKTTSATP

SEQ ID NO: 231 - protein, 659 aa, Streptococcus pneumoniae CDC 20; identical to SEQ ID NO: 219

SEQ ID NO: 232 - protein, 659 aa, Streptococcus pneumoniae CDC 22
MIQIGKIFAGRYRIVKQIGRGGMADVYLAKDLILDGEEVAVKVLRTNYQTDPIAVARFQREARAMADLDHPHIVRITDIGEEDGQQYLAMEYVAGLDLKRYIKEHYPLSNEEAVRIMGQILLAMRLAHTRGIVHRDLKPQNILLTPDGTAKVTDFGIAVAFAETSLTQTNSMLGSVHYLSPEQARGSKATVQSDIYAMGIIFYEMLTGHIPYDGDSAVTIALQHFQKPLPSVIAENSSVPQALENVIIKATAKKLTNRYRSVSEMYVDLSSSLSYNRRNESKLIFDETSKADTKTLPKVSQSTLTSIPKVQAQTEHKSIKNPSQAVTEETYQPQAPKKHRFKMRYLILLASLVLVAASLIWILSRTPATIAIPDVAGQTVAEAKATLKKANFEIGEEKTEASEKVEEGRIIRTDPGAGTGRKEGTKINLVVSSGKQSFQISNYVGRKSSDVIAELKEKKVPDNLIKIEEEESNESEAGTVLKQSLPEGTTYDLSKATQIVLTVAKKATTIQLGNYIGRNSTEVISELKQKKVPENLIKIEEEESSESEPGTIMKQSPGAGTTYDVSKPTQIVLTVAKKVTSVAMPSYIGSSLEFTKNNLIQIVGIKEANIEVVEVTTAPAGSVEGMVVEQSPRAGEKVDLNKTRVKISIYKPKTTSATP

SEQ ID NO: 233 - protein, 659 aa, Streptococcus pneumoniae CDC 23; identical to SEQ ID NO: 219

SEQ ID NO: 234 - protein, 659 aa, Streptococcus pneumoniae CDC 25; identical to SEQ ID NO: 219

SEQ ID NO: 235 - protein, 659 aa, Streptococcus pneumoniae CDC 26
MIQIGKIFAGRYRIVKQIGRGGMADVYLAKDLILDGEEVAVKVLRTNYQTDPIAVARFQREARAMADLDHPHIVRITDIGEEDGQQHLAMEYVAGLDLKRYIKEHYPLSNEEAVRIMGQILLAMRLAHTRGIVHRDLKPQNILLTPDGTAKVTDFGIAVAFAETSLTQTNSMLGSVHYLSPEQARGSKATVQSDIYAMGIIFYEMLTGHIPYDGDSAVTIALQHFQKPLPSVIAENPSVPQALENVIIKATAKKLTNRYRSVSEMYVDLSSSLSYNRRNESKLIFDETSKADTKTLPKVSQSTLTSIPKAQAQTEHKSIKNPSQAVTEETYQPQAPKKHRFKMRYLILLASLVLVAASLIWILSRTPATIAIPDVAGQTVAEAKATLKKANFEIGEEKTEASEKVEEGRIIRTDPGAGTGRKEGTKINLVVSSGKQSFQISNYVGRKSSDVIAELKEKKVPDNLIKIEEEESNESEAGTVLKQSLPEGTTYDLSKATQIVLTVAKKATTIQLGNYIGRNSTEVISELKQKKVPENLIKIEEEESSESEPGTIMKQSPGAGTTYDVSKPTQIVLTVAKKVTSVAMPSYIGSSLEFTKNNLIQIVGIKEANIEVVEVTTAPAGSAEGMVVEQSPRAGEKVDLNKTRVKISIYKPKTTSATP

SEQ ID NO: 236 - protein, 659 aa, Streptococcus pneumoniae CDC 28; identical to SEQ ID NO: 219

SEQ ID NO: 237 - protein, 659 aa, Streptococcus pneumoniae CDC 33
MIQIGKIFAGRYRIVKQIGRGGMADVYLAKDLILDGEEVAVKVLRTNYQTDPIAVARFQREARAMADLDHPHIVRITDIGEEDGQQYLAMEYVAGLDLKRYIKEHYPLSNEEAVRIMGQILLAMRLAHTRGIVHRDLKPQNILLTPDGTAKVTDFGIAVAFAETSLTQTNSMLGSVHYLSPEQARGSKATVQSDIYAMGIIFYEMLTGHIPYDGDSAVTIALQHFQKPLPSVIAENPSVPQALENVIIKATAKKLTNRYRSVSEMYVDLSSSLSYNRRNESKLIFDETSKADTKTLPKVSQSTLTSIPKVQAQTEHKSIKNPSQAVTEETYQPQAPKKHRFKMRYLILLASLVLVAASLIWILSRTPATIAIPDVAGQTVAEAKATLKKANFEIGEEKTEASEKVEEGRIIRTDPGAGTGRKEGTKINLVVSSGKQSFQISNYVGRKSSDVIAELKEKKVPDNLIKIEEEESNESEAGTVLKQSLPEGTTYDLSKATQIVLTVAKKATTIQLGNYIGRNSTEVISELKQKKVPENLIKIEEEESSESEPGTIMKQSPGAGTTYDVSKPTQIVLTVAKKVTSVAMPSYIGSSLEFTKNNLILIVGIKEANIEVVEVTTAPAGSVEGMVVEQSPRAGEKVDLNKTRVKISIYKPKTTSATP

SEQ ID NO: 238 - protein, 659 aa, Streptococcus pneumoniae CDC 34; identical to SEQ ID NO: 219

SEQ ID NO: 239 - protein, 659 aa, Streptococcus pneumoniae CDC 37; identical to SEQ ID NO: 232

SEQ ID NO: 240 - protein, 659 aa, Streptococcus pneumoniae CDC 38; identical to SEQ ID NO: 219

SEQ ID NO: 241 - protein, 659 aa, Streptococcus pneumoniae CDC 39; identical to SEQ ID NO: 219

SEQ ID NO: 242 - protein, 659 aa, Streptococcus pneumoniae CDC 41
MIQIGKIFAGRYRIVKQIGRGGMADVYLAKDLILDGEEVAVKVLRTNYQTDPIAVARFQREARAMADLDHPHIVRITDIGEEDGQQYLAMEYVAGLDLKRYIKEHYPLSNEEAVRIMGQILLAMRLAHTRGIVHRDLKPQNILLTPDGTAKVTDFGIAVAFAETSLTQTNSMLGSVHYLSPEQARGSKATVQSDIYAMGIIFYEMLTGHIPYDGDSAVTIALQHFQKPLPSVIAENPSVPQALENVIIKATAKKLTNRYRSVSEMYVDLSSSLSYNRRNESKLIFDETSKADTKTLPKVSQSTLTSIPKAQAQTEHKSIKNPSQAVTEETYQPQAPKKHRFKMRYLILLASLVLVAASLIWILSRTPATIAIPDVAGQTVAEAKATLKKANFEIGEEKTEASEKVEEGRIIRTDPGAGTGRKEGTKINLVVSSGKQSFQISNYVGRKSSDVIAELKEKKVPDNLIKIEEEESNESEAGTVLKQSLPEGTTYDLSKATQIVLTVAKKATTIQLGNYIGRNSTEVISELKQKKVPENLIKIEEEESSESEPGTIMKQSPGAGTTYDVSKPTQIVLTVAKKVTSVAMPSYIGSSLEFTKNNLIQIVGIKEANIEVVEVTTAPAGSAEGMVVEQSPRAGEKVDLNKTRVKISIYKPKTTSATP

SEQ ID NO: 243 - protein, 659 aa, Streptococcus pneumoniae CDC 42; identical to SEQ ID NO: 219

SEQ ID NO: 244 - protein, 659 aa, Streptococcus pneumoniae CDC 49
MIQIGKIFAGRYRIVKQIGRGGMADVYLAKDLILDGEEVAVKVLRTNYQTDPIAVARFQREARAMADLDHPHIVRITDIGEEDGQQYLAMEYVAGLDLKRYIKEHYPLSNEEAVRIMGQILLAMRLAHTRGIVHRDLKPQNILLTPDGTAKVTDFGIAVAFAETSLTQTNSMLGSVHYLSPEQARGSKATVQSDIYAMGIIFYEMLTGHIPYDGDSAVTIALQHFQKPLPSVIAENPSVPQALENVIIKATAKKLTNRYRSVSEMYVDLSSSLSYNRRNESKLIFDETSKADTKTLPKVSQSTLTSIPKVQAQTEHKSIKNPSQAVTEETYQPQAPKKHRFKMRYLILLASLVLVAASLIWILSRTPATIAIPDVAGQTVAEAKETLKKANFEIGEEKTEASEKVEEGRIIRTDPGAGTGRKEGTKINLVVSSGKQSFQISNYVGRKSSDVIAELKEKKVPDNLIKIEEEESNESEAGTVLKQSLPEGTTYDLSKATQIVLTVAKKATTIQLGNYIGRNSTEVISELKQKKVPENLIKIEEEESSESEPGTIMKQSPGAGTTYDVSKPTQIVLTVAKKVTSVAMPSYIGSSLEFTKNNLIQIVGIKEANIEVVEVTTAPAGSAEGMVVEQSPRAGEKVDLNKTRVKISIYKPKTTSATP

SEQ ID NO: 245 - protein, 659 aa, Streptococcus pneumoniae CDC 50; identical to SEQ ID NO: 219

SEQ ID NO: 246 - protein, 659 aa, Streptococcus pneumoniae CDC 53; identical to SEQ ID NO: 226

SEQ ID NO: 247 - protein, 659 aa, Streptococcus pneumoniae CDC 55
MIQIGKIFAGRYRIVKQIGRGGMADVYLAKDLILDGEEVAVKVLRTNYQTDPIAVARFQREARAMADLDHPHIVRITDIGEEDGQQYLAMEYVAGLDLKRYIKEHYPLSNEEAVRIMGQILLAMRLAHTRGIVHRDLKPQNILLTPDGTAKVTDFGIAVAFAETSLTQTNSMLGSVHYLSPEQARGSKATVKSDIYAMGIIFYEMLTGHIPYDGDSAVTIALQHFQKPLPSVIAENSSVPQALENVIIKATAKKLTNRYRSVSEMYVDLSSSLSYNRRNESKLIFDETSKADTKTLPKVSQSTLTSIPKVQAQTEHKSIKNPSQAVTEETYQPQAPKKHRFKMRYLILLASLVLVAASLIWILSRTPATIAIPDVAGQTVAEAKATLKKANFEIGEEKTEASEKVEEGRIIRTDPGAGTGRKEGTKINLVVSSGKQSFQISNYVGRKSSDVIAELKEKKVPDNLIKIEEEESNESEAGTVLKQSLPEGTTYDLSKATQIVLTVAKKATTIQLGNYIGRNSTEVISELKQKKVPENLIKIEEEESSESEPGTIMKQSPGAGTTYDVSKPTQIVLTVAKKVTSVAMPSYIGSSLEFTKNNLIQIVGIKEANIEVVEVTTAPAGSVEGMVVEQSPRAGEKVDLNKTRVKISIYKPKTTSATP

SEQ ID NO: 248 - protein, 659 aa, Streptococcus pneumoniae CDC 57; identical to SEQ ID NO: 219

SEQ ID NO: 249 - protein, 659 aa, Streptococcus pneumoniae CDC 58
MIQIGKIFAGRYRIVKQIGRGGMADVYLAKDLILDGEEVAVKVLRTNYQTDPIAVARFQREARAMADLDHPHIVRITDIGEEDGQQYLAMEYVAGLDLKRYIKEHYPLSNEEAVRIMGQILLAMRLAHTRGIVHRDLKPQNILLTPDGTAKVTDFGIAVAFAETSLTQTNSMLGSVHYLSPEQARGSKATVQSDIYAMGIIFYEMLTGHIPYDGDSAVTIALQHFQKPLPSVIAENPSVPQALENVIIKATAKKLTNRYRSVSEMYVDLSSSLSYNRRNESKLIFDETSKADTKTLPKVSQSTLTSIPKVQAQTEHKSIKNPSQAVTEETYQPQAPKKHRFKMRYLILLASLVLVAASLIWILSRTPATIAIPDVAGQAVAEAKATLKKANFEIGEEKTEASEKVEEGRIIRTDPGAGTGRKEGTKINLVVSSGKQSFQISNYVGRKSSDVIAELKEKKVPDNLIKIEEEESNESEAGTVLKQSLPEGTTYDLSKATQIILTVAKKATTIQLGNYIGRNSTEVISELKQKKVPENLIKIEEEESSESEPGTIMKQSPGAGTTYDVSKPTQIVLTVAKKVTSVAMPSYIGSSLEFTKNNLIQIVGIKEANIEVVEVTTAPAGSAEGMVVEQSPRAGEKVDLNKTRVKISIYKPKTTSATP

SEQ ID NO: 250 - protein, 659 aa, Streptococcus pneumoniae CDC 60
MIQIGKIFAGRYRIVKQIGRGGMADVYLAKDLILDGEEVAVKVLRTNYQTDPIAVARFQREARAMADLDHPHIVRITDIGEEDGQQYLAMEYVAGLDLKRYIKEHYPLSNEEAVRIMGQILLAMRLAHTRGIVHRDLKPQNILLTPDGTAKVTDFGIAVAFAETSLTQTNSMLGSVHYLSPEQARGSKATVQSDIYAMGIIFYEMLTGHIPYDGDSAVTIALQHFQKPLPSVIAENPSVPQALENVIIKATAKKLTNRYRSVSEMYVDLSSSLSYNRRNESKLNFDETSKADTKTLPKVSQSTLTSIPKVQAQTEHKSIKNPSQTVTEETYQPQAPKKHRFKMRYLILLANLVLVAASLIWILSRTPATIAIPDVAGQTVAEAKATLKKANFEIGEEKTEASEKVEEGRIIRTDPGAGTGRKEGTKINLVVSSGKQSFQISNYVGRKSSDVIAELKEKKVPDNLIKIEEEESNESEAGTVLKQSLPEGTTYDLSKATQIVLTVAKKATTIQLGNYIGRNSTEVISELKQKKVPENLIKIEEEESSESEPGTIMKQSPGAGTTYDVSKPTQIVLTVAKKVTSVAMPSYIGSSLEFTKNNLIQIVGIKEANIEVVEVTTAPAGSVEGMVVEQSPRAGEKVDLNKTRVKISIYKPKTTSATP

SEQ ID NO: 251 - protein, 659 aa, Streptococcus pneumoniae CDC 62; identical to SEQ ID NO: 219

SEQ ID NO: 252 - protein, 659 aa, Streptococcus pneumoniae CDC 65; identical to SEQ ID NO: 219

SEQ ID NO: 253 - protein, 659 aa, Streptococcus pneumoniae CDC 66
MIQIGKIFAGRYRIVKQIGRGGMADVYLAKDLILDGEEVAVKVLRTNYQTDPIAVARFQREARAMADLDHPHIVRITDIGEEDGQQYLAMEYVAGLDLKRYIKEHYPLSNEEAVRIMGQILLAMRLAHTRGIVHRDLKPQNILLTPDGTAKVTDFGIAVAFAETSLTQTNSMLGSVHYLSPEQARGSKATVQSDIYAMGIIFYEMLTGHIPYDGDSAVTIALQHFQKPLPSVIAENSSVPQALENVIIKATAKKLTNRYRSVSEMYVDLSSSLSYNRRNESKLIFDETSKADTKTLPKVSQSTLTSIPKVQAQTEHKSIKNPSQAVTEETYQPQAPKKHRFKMRYLILLASLVLVAASLIWILSRTPATIAIPDVAGQTVAEAKATLKKANFEIGEEKTEASEKVEEGRIIRTDPGAGTGRKEGTKINLVVSSGKQSFQISNYVGRKSSDVIAELKEKKVPDNLIKIEEEESNESEAGTVLKQSLPEGTTYALSKATQIVLTVAKKATTIQLGNYIGRNSTEVISELKQKKVPENLIKIEEEESSESEPGTIMKQSPGAGTTYDVSKPTQIVLTVAKKVTSVAMPSYIGSSLEFTKNNLIQIVGIKEANIEVVEVTTAPAGSVEGMVVEQSPRAGEKVDLNKTRVKISIYKPKTTSATP

SEQ ID NO: 254 - protein, 659 aa, Streptococcus pneumoniae CDC 67; identical to SEQ ID NO: 232

SEQ ID NO: 255 - protein, 659 aa, Streptococcus pneumoniae CDC 68
MIQIGKIFAGRYRIVKQIGRGGMADVYLAKDLILDGEEVAVKVLRTNYQTDPIAVARFQREARAMADLDHPHIVRITDIGEEDGQQYLAMEYVAGLDLKRYIKEHYPLSNEEAVRIMGQILLAMRLAHTRGIVHRDLKPQNILLTPDGTAKVTDFGIAVAFAETSLTQTNSMLGSVHYLSPEQARGSKATVQSDIYAMGIIFYEMLTGHIPYDGDSAVTIALQHFQKPLPSVIAENPSVPQALENVIIKATAKKLTNRYRSVSEMYVDLSSSLSYNRRNESKLIFDETSKADTKTLPKVSQSTLTSIPKVQAQTEHKSIKNPSQAVTEEAYQPQAPKKHRFKMRYLILLASLVLVAASLIWILSRTPATIAIPDVAGQTVAEAKATLKKANFEIGEEKTEASEKVEEGRIIRTDPGAGTGRKEGTKINLVVSSGKQSFQISNYVGRKSSDVIAELKEKKVPDNLIKIEEEESNESEAGTVLKQSLPEGTTYDLSKATQIVLTVAKKATTIQLGNYIGRNSTEVISELKQKKVPENLIKIEEEESSESEPGTIMKQNPGAGTTYDVSKPTQIVLTVAKKVTSVAMPSYIGSSLEFTKNNLIQIVGIKEANIEVVEVTTAPAGSAEGMVVEQSPRAGEKVDLNKTRVKISIYKPKTTSATP

SEQ ID NO: 256 - protein, 659 aa, Streptococcus pneumoniae CDC 69
MIQIGKIFAGRYRIVKQIGRGGMADVYLAKDLILDGEEVAVKVLRTNYQTDPIAVARFQREARAMADLDHPHIVRITDIGEEDGQQYLAMEYVAGLDLKRYIKEHYPLSNEEAVRIMGQILLAMRLAHTRGIVHRDLKPQNILLTPDGTAKVTDFGIAVAFAETSLTQTNSMLGSVHYLSPEQARGSKATVQSDIYAMGIIFYEMLTGHIPYDGDSAVTIALQHFQKPLPSVIAENPSVPQALENVIIKATAKKLTNRYRSVSEMYVDLSSSLSYNRRNESKLIFDETSKADTKTLPKVSQSTLTSIPKVQAQTEHKSIKNPSQAVTEETYQPQAPKKHRFKMRYLILLASLVLVAASLIWILSRTPATIAIPDVAGQTVAEAKATLKKANFEIGEEKTEASEKVEEGRIIRTDPGAGTGRKEGTKINLVVSSGKQSFQISNYVGRKSSDVIAELKEKKVPDNLIKIEEEESNESEAGTVLKQSLPEGTTYDLSKATQIVLTVAKKATTIQLGNYIGRNSTEVISELKQKKVPENLIKIEEEESSESEPGTIMKQSPGAGTTYDVSKPTQIVLTVAKKVTSVAMPSYIGSSLEFTKNNLIQIVGIKEANIEVVEVTTAPAGSAEGMVVEQSPKAGEKVDLNKTRVKISIYKPKTTSATP

SEQ ID NO: 257 - protein, 659 aa, Streptococcus pneumoniae CDC 70; identical to SEQ ID NO: 253

SEQ ID NO: 258 - protein, 659 aa, Streptococcus pneumoniae CDC 71; identical to SEQ ID NO: 219

SEQ ID NO: 259 - protein, 659 aa, Streptococcus pneumoniae CDC 74; identical to SEQ ID NO: 242

SEQ ID NO: 260 - protein, 659 aa, Streptococcus pneumoniae CDC 76
MIQIGKIFAGRYRIVKQIGRGGMADVYLAKDLILDGEEVAVKVLRTNYQTDPIAVARFQREARAMAVLDHPHIVRITDIGEEDGQQYLAMEYVAGLDLKRYIKEHYPLSNEEAVRIMGQILLAMRLAHTRGIVHRDLKPQNILLTPDGTAKVTDFGIAVAFAETSLTQTNSMLGSVHYLSPEQARGSKATVQSDIYAMGIIFYEMLTGHIPYDGDSAVTIALQHFQKPLPSVIAENPSVPQALENVIIKATAKKLTNRYRSVSEMYVDLSSSLSYNRRNESKLIFDETSKADTKTLPKVSQSTLTSIPKVQAQTEHKSIKNPSQAVTEETYQPQAPKKHRFKMRYLILLASLVLVAASLIWILSRTPATIAIPDVAGQTVAEAKATLKKANFEIGEEKTEASEKVEEGRIIRTDPGAGTGRKEGTKINLVVSSGKQSFQISNYVGRKSSDVIAELKEKKVPDNLIKIEEEESNESEAGTVLKQSLPEGTTYDLSKATQIVLTVAKKATTIQLGNYIGRNSTEVISELKQKKVPENLIKIEEEESSESEPGTIMKQSPGAGTTYDVSKPTQIVLTVAKKVTSVAMPSYIGSSLEFTKNNLIQIVGIKEANIEVVEVTTAPAGSAEGMVVEQSPRAGEKVDLNKTRVKISIYKPKTTSATP

SEQ ID NO: 261 - protein, 659 aa, Streptococcus pneumoniae CDC 77
MIQIGKIFAGRYRIVKQIGRGGMADVYLAKDLILDGEEVAVKVLRTNYQTDPIAVARFQREARAMADLDHPHIVRITDIGEEDGQQYLAMEYVAGLDLKRYIKEHYPLSNEEAVRIMGQILLAMRLAHTRGIVHRDLKPQNILLTPDGTAKVTDFGIAVAFAETSLTQTNSMLGSVHYLSPEQARGSKATVQSDIYAMGIIFYEMLTGHIPYDGDSAVTIALQHFQKPLPSVIAENPSVPQALENVIIKATAKKLTNRYRSVSEMYVDLSSSLSYNRRNESKLIFDETSKADTKTLPKVSQSTLTSIPKVQAQTEHKSIKNPSQAVTEETYQPQAPKKHRFKMRYLILLASLVLVAASLIWILSRTPATIAIPDVAGQTVAEAKATLKKANFEIGEEKTEASEKVEEGRIIRTDPGAGTGRKEGTKINLVVSSGKQSFQISNYVGRKSSDVIAELKEKKVPDNLIKIEEEESNESEAGTVLKQSLPEGTTYALSKATQIVLTVAKKATTIQLGNYIGRNSTEVISELKQKKVPENLIKIEEEESSESEPGTIMKQSPGAGTTYDVSKPTQIVLTVAKKVTSVAMPSYIGSSLEFTKNNLIQIVGIKEANIEVVEVTTAPAGSAEGMVVEQSPRAGEKVDINKTRVKISIYKPKTTSATP

SEQ ID NO: 262 - protein, 659 aa, Streptococcus pneumoniae CDC 78
MIQIGKIFAGRYRIVKQIGRGGMADVYLAKDLILDGEEVAVKVLRTNYQTDPIAVARFQREARAMADLDHPHIVRITDIGEEDGQQYLAMEYVAGLDLKRYIKEHYPLSNEEAVRIMGQILLAMRLAHTRGIVHRDLKPQNILLTPDGTAKVTDFGIAVAFAETSLTQTNSMLGSVHYLSPEQARGSKATVQSDIYAMGIIFYEMLTGHIPYDGDSAVTIALQHFQKPLPSVIAENPSVPQALENVIIKATAKKLTNRYRSVSEMYVDLSSSLSYNRRNESKLIFDETSKADTKILPKVSQSTLTSIPKVQAQTEHKSIKNPSQAVTEETYQPQAPKKHRFKMRYLILLASLVLVAASLIWILSRTPATIAIPDVAGQTVAEAKATLKKANFEIGEEKTEASEKVEEGRIIRTDPGAGTGRKEGTKINLVVSSGKQSFQISNYVGRKSSDVIAELKEKKVPDNLIKIEEEESNESEAGTVLKQSLPEGTTYDLSKATQIVLTVAKKATTIQLGNYIGRNSTEVISELKQKKVPENLIKIEEEESSESEPGTIMKQSPGAGTTYDVSKPTQIVLTVAKKVTSVAMPSYIGSSLEFTKNNLIQIVGIKEANIEVVEVTTAPAGSAEGMVVEQSPRAGEKVDLNKTRVKISIYKPKTTSATP

SEQ ID NO: 263 - protein, 659 aa, Streptococcus pneumoniae CDC 80
MIQIGKIFAGRYRIVKQIGRGGMADVYLAKDLILDGEEVAVKVLRTNYQTDPIAVARFQREARAMADLDHPHIVRITDIGEEDGQQYLAMEYVAGLDLKRYIKEHYPLSNEEAVRIMGQILLAMRLAHTRGIVHRDLKPQNILLTPDGTAKVTDFGIAVAFAETSLTQTNSMLGSVHYLSPEQARGSKATVQSDIYAMGIIFYEMLTGHIPYDGDSAVTIALQHFQKPLPSVIAENSSVPQALENVIIKATAKKLTNRYRSVSEMYVDLSSSLSYNRRNESKLIFDETSKADTKTLPKVSQSTLTSIPKVQAQTEHKSIKNPSQAVTEETYQPQAPKKHRFKMRYLILLASLVLVAASLIWILSRTPATIAIPDVAGQTVAEAKATLKKANFEIGEEKTEASEKVEEGRIIRTDPGAGTGRKEGTKINLVVSSGKQSFQISNYVGRKSSDVIAELKEKKVPDNLIKIEEEESNESEAGTVLKQSLPEGTTYDLSKATQIVLTVAKKATTIQLGNYIGRNSTEVISELKQKKVPENLIKIEEEESSESEPGTIMKQSPGAGTTYDVSKPTQIVLTVAKKVTSVAMPSYIGSSLEFTKNNLIQIVGIKEANIEVVEVTTAPAGSAEGMVVEQSPRAGEKVDLNKTRVKISIYKPKTTSATP

SEQ ID NO: 264 - protein, 659 aa, Streptococcus pneumoniae CDC 81; identical to SEQ ID NO: 255

SEQ ID NO: 265 - protein, 659 aa, Streptococcus pneumoniae CDC 83; identical to SEQ ID NO: 242

SEQ ID NO: 266 - protein, 659 aa, Streptococcus pneumoniae CDC 84; identical to SEQ ID NO: 244

SEQ ID NO: 267 - protein, 659 aa, Streptococcus pneumoniae CDC 86
MIQIGKIFAGRYRIVKQIGRGGMADVYLAKDLILDGEEVAVKVLRTNYQTDPIAVARFQREARAMADLDHPHIVRITDIGEEDGQQYLAMEYVAGLDLKRYIKEHYPLSNEEAVRIMGQILLAMRLAHTRGIVHRDLKPQNILLTPDGTAKVTDFGIAVAFAETSLTQTNSMLGSVHYLSPEQARGSKATVQSDIYAMGIIFYEMLTGHIPYDGDSAVTIALQHFQKPLPSVIAENPSVPQALENVIIKATAKKLTNRYRSVSEMYVDLSSILSYNRRNESKLIFDETSKADTKTLPKVSQSTLTSIPKVQAQTEHKSIKNPSQAVTEETYQPQAPKKHRFKMRYLILLASLVLVAASLIWILSRTPATIAIPDVAGQTVAEAKATLKKANFEIGEEKTEASEKVEEGRIIRTDPGAGTGRKEGTKINLVVSSGKQSFQISNYVGRKSSDVIAELKEKKVPDNLIKIEEEESNESEAGTVLKQSLPEGTTYDLSKATQIVLTVAKKATTIQLGNYIGRNSTEVISELKQKKVPENLIKIEEEESSESEPGTIMKQSPGAGTTYDVSKPTQIVLTVAKKVTSVAMPSYIGSSLEFTKNNLIQIVGIKEANIEVVEVTTAPAGSAEGMVVEQSPRAGEKVDLNKTRVKISIYKPKTTSATP

SEQ ID NO: 268 - protein, 659 aa, Streptococcus pneumoniae CDC 89
MIQIGKIFAGRYRIVKQIGRGGMADVYLAKDLILDGEEVAVKVLRTNYQTDPIAVARFQREARAMADLDHPHIVRITDIGEEDSQQYLAMEYVAGLDLKRYIKEHYPLSNEEAVRIMGQILLAMRLAHTRGIVHRDLKPQNILLTPDGTAKVTDFGIAVAFAETSLTQTNSMLGSVHYLSPEQARGSKATVQSDIYAMGIIFYEMLTGHIPYDGDSAVTIALQHFQKPLPSVIAENPSVPQALENVIIKATAKKLTNRYRSVSEMYVDLSSSLSYNRRNESKLIFDETSKADTKTLPKVSQSTLTSIPKVQAQTEHKSIKNPSQAVTEEAYQPQAPKKHRFKMRYLILLASLVLVAASLIWILSRTPATIAIPDVAGQTVAEAKATLKKANFEIGEEKTEASEKVEEGRIIRTDPGAGTGRKEGTKINLVVSSGKQSFQISNYVGRKSSDVIAELKEKKVPDNLIKIEEEESNESEAGTVLKQSLPEGTTYDLSKATQIVLTVAKKATTIQLGNYIGRNSTEVISELKQKKVPENLIKIEEEESSESEPGTIMKQNPGAGTTYDVSKPTQIVLTVAKKVTSVAMPSYIGSSLEFTKNNLIQIVGIKEANIEVVEVTTAPAGSAEGMVVEQSPRAGEKVDLNKTRVKISIYKPKTTSATP

SEQ ID NO: 269 - protein, 658 aa, Streptococcus pneumoniae CDC 93
MIQIGKIFAGRYRIVKQIGRGGMADVYLAKDLILDGEEVAVKVLRTNYQTDPIAVARFQREARAMADLDHPHIVRITDIGEEDGQQYLAMEYVAGLDLKRYIKEHYPLSNEEAVRIMGQILLAMRLAHTRGIVHRDLKPQNILLTPDGTAKVTDFGIAVAFAETSLTQTNSMLGSVHYLSPEQARGSKATVQSDIYAMGIIFYEMLTGHIPYDGDSAVTILQHFQKPLPSVIAENPSVPQALENVIIKATAKKLTNRYRSVSEMYVDLSSSLSYNRRNESKLIFDETSKADTKTLPKVSQSTLTSIPKVQAQTEHKSIKNPSQAVTEETYQPQAPKKHRFKMRYLILLASLVLVAASLIWILSRTPATIAIPDVAGQTVAEAKATLKKANFEIGEEKTEASEKVEEGRIIRTDPGAGTGRKEGTKINLVVSSGKQSFQISNYVGRKSSDVIAELKEKKVPDNLIKIEEEESNESEAGTVLKQSLPEGTTYDLSKATQIILTVAKKATTIQLGNYIGRNSTEVISELKQKKVPENLIKIEEEESSESEPGTIMKQSPGAGTTYDVSKPTQIVLTVAKKVTSVAMPSYIGSSLEFTKNNLIQIVGIKEANIEVVEVTTAPAGSAEGMVVEQSPRAGEKVDLNKTRVKISIYKPKTTSATP

SEQ ID NO: 270 - protein, 659 aa, Streptococcus pneumoniae CDC 95; identical to SEQ ID NO: 219

SEQ ID NO: 271 - protein, 659 aa, Streptococcus pneumoniae CDC 100; identical to SEQ ID NO: 219

SEQ ID NO: 272 - protein, 659 aa, Streptococcus pneumoniae CDC 103; identical to SEQ ID NO: 219

SEQ ID NO: 273 - protein, 659 aa, Streptococcus pneumoniae CDC 104; identical to SEQ ID NO: 219

SEQ ID NO: 274 - protein, 658 aa, Streptococcus pneumoniae CDC 108
MIQIGKIFAGRYRIVKQIGRGGMADVYLAKDLILDGEEVAVKVLRTNYQTDPIAVARFQREARAMADLDHPHIVRITDIGEEDGQQYLAMEYVAGLDLKRYIKEHYPLSNEEAVRIMGQILLAMRLAHTRGIVHRDLKPQNILLTPDGTAKVTDFGIAVAFAETSLTQTNSMLGSVHYLSPEQARGSKATVQSDIYAMGIIFYEMLTGHIPYDGDSAVTIALQHFQKPLPSVIAENPSVPQALENVIIKATAKKLTNRYRSVSEMYVDLSSSLSYNRRNESKLIFDETSKADTKTLPKVSQSTLTSIPKVQAQTEHKSIKNPSQAVTEETYQPQAPKKHRFKMRYLILLASLVLVAASLIWILSRTPATIAIPDVAGQTVAEAKATLKKANFEIGEEKTEASEKVEEGRIIRTDPGAGTGRKEGTKINLVVSSGKQSFQISNYVGRKSDVIAELKEKKVPDNLIKIEEEESNESEAGTVLKQSLPEGTTYDLSKATQIVLTVAKKATTIQLGNYIGRNSTEVISELKQKKVPENLIKIEEEESSESEPGTIMKQSPGAGTTYDVSKPTQIVLTVAKKVTSVAMPSYIGSSLEFTKNNLIQIVGIKEANIEVVEVTTAPAGSVEGMVVEQSPRAGEKVDLNKTRVKISIYKPKTTSATP

SEQ ID NO: 275 - protein, 659 aa, Streptococcus pneumoniae CDC 109; identical to SEQ ID NO: 232

SEQ ID NO: 276 - protein, 659 aa, Streptococcus pneumoniae CDC 110; identical to SEQ ID NO: 219

SEQ ID NO: 277 - protein, 659 aa, Streptococcus pneumoniae CDC 111; identical to SEQ ID NO: 232

SEQ ID NO: 278 - protein, 659 aa, Streptococcus pneumoniae CDC 112; identical to SEQ ID NO: 219

SEQ ID NO: 279 - protein, 659 aa, Streptococcus pneumoniae CDC 113; identical to SEQ ID NO: 226

SEQ ID NO: 280 - protein, 659 aa, Streptococcus pneumoniae CDC 115; identical to SEQ ID NO: 219

SEQ ID NO: 281 - protein, 659 aa, Streptococcus pneumoniae Pj-1293; identical to SEQ ID NO: 219

SEQ ID NO: 282 - protein, 644 aa, Streptococcus pneumoniae I-33
MIQIGKIFAGRYRIVKQIGRGGMADVYLAKDLILDGEEVAVKVLRTNYQTDPIAVARFQREARAMADLDHPHIVRITDIGEEDGQQYLAMEYVAGLDLKRYIKEHYPLSNEEAVRIMGQILLAMRLAHTRGIVHRDLKPQNILLTPDGTAKVTDFGIAVAFAETSLTQTNSMLGSVHYLSPEQARGSKATFQSDIYAMGIIFYEMLTGHIPYDGDSAVTIALQHFQKPLPSVIAENPSVPQALENVVIKATAKKLSDRYQSVSEMYVDLSTSLSYNRRNEPKLVFDDASKADTKTLPKVPQSTLTSIPKAPAQEERPQPKKPTQPVAEPAPAPKPAKKRKFKARYMILLASLLLVAASLVWILSRTPATIAIPDVAGQTVAEAKEALKKSKFEAGEEKSEASDTVAEGRVIRTDPEAGSGRKEGTKVNLIVSSGKQSFQLSNYVGRKYTDVVAELKEKKVPENLIKMEEEESSESEPGTVLRQTPASGSTYDLSKATTITLTVAKKVTSVSMPNYIGSSLEFTKNNLTQIVGVKEANIEVVEVSNAPEGTAEGTVVSQTPRAGELVDLASTRIKLSIYKPKTPPSTSSSNPAQRGNQGSPTSPTQGNQQGNQQGNQQGNNPPTNQPVRRFVCYTPEQCSARDMS

SEQ ID NO: 283 - protein, 659 aa, Streptococcus pneumoniae Pj-1319; identical to SEQ ID NO: 221

SEQ ID NO: 284 - protein, 659 aa, Streptococcus pneumoniae Pj-1321
MSPFRYIFVGFYRIVKQIGRGGMADVYLAKDLILDGEEVAVKVLRTNYHTDPIAVARFQREARAMAHLNHPHIVRITDIGEEDGQQYLAMEYVAGLDLKRYIKEHYPLSNEEAVRIMGQILLAMRLAHTRGIVHRDLKPQNILLTPDGTAKVTDFGIAVAFAETSLTQTNSMLGSVHYLSPEQARGSKATVQSDIYAMGIIFYEMLTGHIPYDGDSAVTIALQHFQKPLPSVIAENPSVPQALENVIIKATAKKLTNRYRSVSEMYVDLSSSLSYNRRNESKLIFDETSKADTKTLPKVSQSTLTSIPKVQAQTEHKSIKNPSQAVIEETYQPQAPKKHRFKMRYLILLASLVLVAASLIWILSRTPATIAIPDVAGQTVAEAKATLKKANFEIGEEKTEASEKVEEGRIIRTDPGAGTGRKEGTKINLVVSSGKQSFQISNYVGRKSSDVIAELKEKKVPDNLIKIEEEESNESEAGTVLKQSLPEGTTYDLSKATQIVLTVAKKATTIQLGNYIGRNSTEVISELKQKKVPENLIKIEEEESSESEPGTIMKQSPGAGTTYDVSKPTQIVLTVAKKVTSVAMPSYIGSSLEFTKNNLIQIVGIKEANIEVVEVTTAPAGSAEGMVVEQSPRAGEKVDLNKTRVKISIYKPKTTSATP

SEQ ID NO: 285 - protein, 659 aa, Streptococcus pneumoniae Pj-1241
MIQIGKIFAGRYRIVKQIGRGGMADVYLAKDLILDGEEVAVKVLRTNYQTDPIAVARFQREARAMADLDHPHIVRITDIGEEDGQQYLAMEYVAGLDLKRYIKEHYPLSNEEAVRIMGQILLAMRLAHTRGIVHRDLKPQNILLTPDGTAKVTDFGIAVAFAETSLTQTNSMLGSVHYLSPEQARGSKATVQSDIYAMGIIFYEMLTGHIPYDGDSAVTIALQHFQKPLPSVIAENPSVPQALENVIIKATAKKLTNRYRSVSEMYVDLSSSLSYNRRNESKLIFDETSKADTKTLPKVSQSTLTSIPKVQAQTEHKSIKNPSQAVTEETYQPQAPKKHRFKMRYLILLASLVLVAASLIWILSRTPATIAIPDVAGQTVAEAKATLKKANFEIGEEKTEASEKVEEGRIIRTDPGAGTGRKEGTKINLVVSSGKQSFQISNYVGRKSSDVIAELKEKKVPDNLIKIEEEESNESEAGTVLKQSLPEGTTYDLSKATQIVLTVAKKATTIQLGNYIGRNSTEVISELKQKKVPENLIKIEEEESSESEPGTIMKQSPGAGTTYDVSKPTQIVLTVAKKVTSVAMPSYIGSSLEFTKNNLIQIVGIKEANIEVVEVTTAPAGSVEGMVVEQSPRVGEKVDLNKTRVKISIYKPKTTSATP

SEQ ID NO: 286 - protein, 659 aa, Streptococcus pneumoniae Pj-1296
MIQIGKIFAGRYRIVKQIGRGGMADVYLAKDLILDGEEVAVKVLRTNYQTDPIAVARFQREARAMADLDHPHIVRITDIGEEDGQQYLAMEYVAGLDLKRYIKEHYPLSNEEVVRIMGQILLAMRLAHTRGIVHRDLKPQNILLTPDGTAKVTDFGIAVAFAETSLTQTNSMLGSVHYLSPEQARGSKATVQSDIYAMGIIFYEMLTGHIPYDGDSAVTIALQHFQKPLPSVIAENPSVPQALENVIIKATAKKLTNRYRSVSEMYVDLSSSLSYNRRNESKLIFDETSKADTKTLPKVSQSTLTSIPKVQAQTEHKSIKNPSQAVTEETYQPQAPKKHRFKMRYLILLASLVLVAASLIWILSRTPATIAIPDVAGQTVAEAKETLKKANFEIGEEKTEASEKVEEGRIIRTDPGAGTGRKEGTKINLVVSSGKQSFQISNYVGRKSSDVIAELKEKKVPDNLIKIEEEESNESEAGTVLKQSLPEGTTYDLSKATQIVLTVAKKATTIQLGNYIGRNSTEVISELKQKKVPENLIKIEEEESSESEPGTIMKQSPGAGTTYDVSKPTQIVLTVAKKVTSVAMPSYIGSSLEFTKNNLIQIVGIKEANIEVVEVTTAPAGSAEGMVVEQSPRAGEKVDLNKTRVKISIYKPKTTSATP

SEQ ID NO: 287 - protein, 659 aa, Streptococcus pneumoniae Pj-1466; identical to SEQ ID NO: 286

SEQ ID NO: 288 - protein, 659 aa, Streptococcus pneumoniae Pj-615; identical to SEQ ID NO: 226

SEQ ID NO: 289 - protein, 659 aa, Streptococcus pneumoniae Pj-1255; identical to SEQ ID NO: 226

SEQ ID NO: 290 - protein, 659 aa, Streptococcus pneumoniae Pj-1410; identical to SEQ ID NO: 219

SEQ ID NO: 291 - protein, 659 aa, Streptococcus pneumoniae Pj-1374
MIQIGKIFAGRYRIVKQIGRGGMADVYLAKDLILDGEEVAVKVLRTNYQTDPIAVARFQREARAMADLDHPHIVRITDIGEEDGQQYLAMEYVAGLDLKRYIKEHYPLSNEEAVRIMGQILLAMRLAHTRGIVHRDLKPQNILLTPDGTAKVTDFGIAVAFAETSLTQTNSMLGSVHYLSPEQARGSKATVQSDIYAMGIIFYEMLTGHIPYDGDSAVTIALQHFQKPLPSVIAENPSVPQALENVIIKATAKKLTNRYRSVSEMYVDLSSSLSYNRRNESKLIFDETSKADTKTLPKVSQSTLTSIPKVQAQTEHKSIKNPSQAVTEETYQPQAPKKHRFKMRYLILLASLVLVAASLIWILSRTPATIAIPDVAGQTVAEAKATLKKANFEIGEEKTEASEKVEEGRIIRTDPGAGTGRKEGTKINLVVSSGKQSFQISNYVGRKSSDVIAELKEKKVPDNLIKIEEEESNESEAGTVLKQSLPEGTTYDLSKATQIVLTVAKKATTIQLGNYIGRNSTEVISELKQKKVPENLIKIEEEESSESEPGTIMKQSPGAGTTYDVSKPTQIVLTVAKKVTSVAMPSYIGSSLEFTKNNLIQIVGIKEANIEVIEVTTAPAGSVEGMVVEQSPRAGEKVDLNKTRVKISIYKPKTTSATP

SEQ ID NO: 292 - protein, 659 aa, Streptococcus pneumoniae Pj02-912; identical to SEQ ID NO: 219

SEQ ID NO: 293 - protein, 659 aa, Streptococcus pneumoniae Pj-1364
MIQIGKIFAGRYRIVKQIGRGGMADVYLAKDLILDGEEVAVKVLRTNYQTDPIAVARFQREARAMADLDHPHIVRITDIGEEDGQQYLAMEYVAGLDLKRYIKEHYPLSNEEAVRIMGQILLAMRLAHTRGIVHRDLKPQNILLTPDGTAKVTDFGIAVAFAETSLTQTNSMLGSVHYLSPEQARGSKATVQSDIYAMGIIFYEMLTGHIPYDGDSAVTIALQHFQKPLPSVIAENPSVPQALENVIIKATAKKLTNRYRSVSEMYVDLSSSLSYNRRNESKLIFDETSKADTKTLPKVSQSTLTSIPKVQAQTEHKSIKNPSQAVTEETYQPQAPKKHRFKMRYLILLASLVLVAASLIWILSRTPATIAIPDVAGQTVAEAKATLKKANFEIGEEKTEASEKVEEGRIIRTDPGAGTGRKEGTKINLVVSSGKQSFQISNYVGRKSSDVIAELKEKKVPDNLIKIEEEESNESEAGTVLKQSLPEGTTYDLSKATQIVLTVAKKATTIQLGNYIGRNSTEVISDLKQKKVPENLIKIEEEESSESEPGTIMKQSPGAGTTYDVSKPTQIVLTVAKKVTSVAMPSYIGSSLEFTKNNLIQIVGIKEANIEVVEVTTAPAGSVEGMVVEQSPRAGEKVDLNKTRVKISIYKPKTTSATP

SEQ ID NO: 294 - protein, 659 aa, Streptococcus pneumoniae Pj-1445
MIQIGKIFAGRYRIVKQIGRGGMADVYLAKDLILDGEEVAVKVLRTNYQTDPIAVARFQREARAMADLDHPHIVRITDIGEEDGQQYLAMEYVAGLDLKRYIKEHYPLSNEEAVRIMGQILLAMRLAHTRGIVHRDLKPQNILLTPDGTAKVTDFGIAVAFAETSLTQTNSMLGSVHYLSPEQARGSKATVQSDIYAMGIIFYEMLTGHIPYDGDSAVTIALQHFQKPLPSVIAENPSVPQALENVIIKATAKKLTNRYRSVSEMYVDLSSSLSYNRRNESKLIFDETSKADTKTLPKVSQSTLTSIPKAQAQTEHKSIKNPSQAVTEETYQPQAPKKHRFKMRYLILLASLVLVAASLIWILSRTPATIAIPDVAGQTVAEAKATLKKANFEIGEEKTEASEKVEEGRIIRTDPGAGTGRKEGTKINLVVSSGKQSFQISNYVGRKSSDVIAELKEKKVPDNLIKIEEEESNESEAGTVLKQSLPEGTTYDLSKATQIVLTVAKKATTIQLGNYIGRNSTEVISELKQKKVPENLIKIEEEESSESEPGTIMKQSPGAGTTYDVSKPTQIVLTVAKKVTSVAMPSYIGSSLEFTKNNLIQIVGIKEANIEVVEVTTAPAGSVEGMVVEQSPRAGEKVDLNKTRVKISIYKPKTTSATP

SEQ ID NO: 295 - protein, 659 aa, Streptococcus pneumoniae Pj-3; identical to SEQ ID NO: 294

SEQ ID NO: 296 - protein, 659 aa, Streptococcus pneumoniae Pj-2449; identical to SEQ ID NO: 219

SEQ ID NO: 297 - protein, 659 aa, Streptococcus pneumoniae Pj-1874; identical to SEQ ID NO: 219

SEQ ID NO: 298 - protein, 659 aa, Streptococcus pneumoniae Pj-2129; identical to SEQ ID NO: 286

SEQ ID NO: 299 - protein, 659 aa, Streptococcus pneumoniae Pj-2245; identical to SEQ ID NO: 226

SEQ ID NO: 300 - protein, 659 aa, Streptococcus pneumoniae Pj-132; identical to SEQ ID NO: 219

SEQ ID NO: 301 - protein, 659 aa, Streptococcus pneumoniae Pj-1327; identical to SEQ ID NO: 221

SEQ ID NO: 302 - protein, 659 aa, Streptococcus pneumoniae Pj-1498; identical to SEQ ID NO: 219

SEQ ID NO: 303 - protein, 659 aa, Streptococcus pneumoniae Pj-1329; identical to SEQ ID NO: 219

SEQ ID NO: 304 - protein, 659 aa, Streptococcus pneumoniae Pj-1494; identical to SEQ ID NO: 219

SEQ ID NO: 305 - protein, 659 aa, Streptococcus pneumoniae RP-2896; identical to SEQ ID NO: 221

SEQ ID NO: 306 - protein, 659 aa, Streptococcus pneumoniae Pj-362; identical to SEQ ID NO: 219

SEQ ID NO: 307 - protein, 633 aa, Streptococcus pneumoniae Pj-1291
MIQIGKIFAGRYRIVKQIGRGGMADVYLAKDLILDGEEVAVKVLRTNYQTDPIAVARFQREARAMADLDHPHIVRITDIGEEDGQQYLAMEYVAGLDLKRYIKEHYPLSNEEAVRIMGQILLAMRLAHTRGIVHRDLKPQNILLTPDGTAKVTDFGIAVAFAETSLTQTNSMLGSVHYLSPEQARGSKATFQSDIYAMGIIFYEMLTGHIPYDGDSAVTIALQHFQKPLPSVIAENPSVPQALENVVIKATAKKLSDRYQSVSEMYVDLSTSLSYNRRNEPKLVFDDASKADTKTLPKVPQSTLTSIPKAPAQEERPQPKKPTQPVAEPAPAPKPAKKRKFKARYMILLASLLLVAASLVWILSRTPATIAIPDVAGQTVAEAKEALKKSKFEAGEEKSEASDTVAEGRVIRTDPEAGSGRKEGTKVNLIVSSGKQSFQLSNYVGRKYTDVVAELKEKKVPENLIKMEEEESNESEPGIVLRQTPASGSTYDLSKATTITLTVAKKVTSVSMPNYIGSSLEFTKNNLTQIVGVKEANIEVVEVSTAPEGTAEGTVVNQTPRAGEQVDLASTRIKLSIYKPKTPPSTSSSNPAQRGNQGSPTSPNQGNQQGNQQGNTPSSSHPISIRCANNAGA

SEQ ID NO: 308 - protein, 659 aa, Streptococcus pneumoniae Pj-1248; identical to SEQ ID NO: 219

SEQ ID NO: 309 - protein, 659 aa, Streptococcus pneumoniae Pj-2250
MIQIGKIFAGRYRIVKQIGRGGMADVYLAKDLILDGEEVAVKVLRTNYQTDPIAVARFQREARAMADLDHPHIVRITDIGEEDGQQYLAMEYVAGLDLKRYIKEHYPLSNEEAVRIMGQILLAMRLAHTRGIVHRDLKPQNILLTPDGTAKVTDFGIAVAFAETSLTQTNSMLGSVHYLSPEQARGSKATVQSDIYAMGIIFYEMLTGHIPYDGDSAVTIALQHFQKPLPSVIAENPSVPQALENVIIKATAKKLTNRYRSVSEMYVDLSSSLSYNRRNESKLIFDETSKADTKTLPKVSQSTLTSIPKVQAQTEHKSIKNPSQAVTEETYQPQAPKKHRFKMRYLILLASLVLVAASLIWILSRTPATIAIPDVAGQTVAEAKATLKKANFEIGEEKTEASEKVEEGRIIRTDPGAGTGRKEGTKINLVVSSGKQSFQISNYVGRKSSDVIAELKEKKVPDNLIKIEEEESNESEAGTVLKQSLPEGTTYALSKATQIVLTVAKKATTIQLGNYIGRNSTEVISELKQKKVPENLIKIEEEESSESEPGTIMKQSPGAGTTYDVSKPTQIVLTVAKKVTSVAMPSYIGSSLEFTKNNLIQIVGIKEANIEVVEVTTAPAGSAEGMVVEQSPRAGEKVDLNKTRVKISIYKPKTTSATP

SEQ ID NO: 310 - protein, 659 aa, Streptococcus pneumoniae I-59; identical to SEQ ID NO: 226

SEQ ID NO: 311 - protein, 659 aa, Streptococcus pneumoniae Pj-1857
MIQIGKIFAGRYRIVKQIGRGGMADVYLAKDLILDGEEVAVKVLRTNYQTDPIAVARFQREARAMADLDHPHIVRITDIGEEDGQQYLAMEYVAGLDLKRYIKEHYPLSNEEAVRIMGQILLAMRLAHTRGIVHRDLKPQNILLTPDGTAKVTDFGIAVAFAETSLTQTNSMLGSVHYLSPEQARGSKATVQSDIYAMGIIFYEMLTGHIPYDGDSAVTIALQHFQKPLPSVIAENPSVPQALENVIIKATAKKLTNRYRSVSEMYVDLSSSLSYNRRNESKLIFDETSKADTKTLPKVSQSTLTSIPKVQAQTEHKSIKNPSQAVTEETYQPQAPKKHRFKMRYLILLASLVLLAASLIWILSRTPATIAIPDVAGQTVAEAKATLKKANFEIGEEKTEASEKVEEGRIIRTDPGAGTGRKEGTKINLVVSSGKQSFQISNYVGRKSSDVIAELKEKKVPDNLIKIEEEESNESEAGTVLKQSLPEGTTYDLSKATQIVLTVAKKATTIQLGNYIGRNSTEVISELKQKKVPENLIKIEEEESSESEPGTIMKQSPGAGTTYDVSKPTQIVLTVAKKVTSVAMPSYIGSSLEFTKNNLIQIVGIKEANIEVVEVTTAPAGSVEGMVVEQSPRAGEKVDLNKTRVKISIYKPKTTSATP

SEQ ID NO: 312 - protein, 659 aa, Streptococcus pneumoniae Pj-1287; identical to SEQ ID NO: 294

SEQ ID NO: 313 - protein, 659 aa, Streptococcus pneumoniae Pj-1283; identical to SEQ ID NO: 253

SEQ ID NO: 314 - protein, 659 aa, Streptococcus pneumoniae Pj-1176
MIQIGKIFAGRYRIVKQIGRGGMADVYLAKDLILDGEEVAVKVLRTNYQTDPIAVARFQREARAMADLDHPHIVRITDIGEEDGQQYLAMEYVAGLDLKRYIKEHYPLSNEEAVRIMGQILLAMRLAHTRGIVHRDLKPQNILLTPDGTAKVTDFGIAVAFAETSLTQTNSMLGSVHYLSPEQARGSKATVQSDIYAMGIIFYEMLTGHIPYDGDSAVTIALQHFQKPLPSVIAENPSVPQALENVIIKATAKKLTNRYRSVSEMYVDLSSSLSYNRRNESKLIFDETSKADTKTLPKVSQSTLTSIPKVQAQTEHKSIKNPSQAVTEETYQPQAPKKHRFKMRYLILLASLVLVAASLIWILSRTPATIAIPDVAGQTVAEAKATLKKANFEIGEEKTEASEKVEEGRIIRTDPGAGTGRKEGTKINLVVSSGKQSFQISNYVGRKSSDVIAELKEKKVPDNLIKIEEEESNESEAGTVLKQSLPEGTTYDLSKATQIVLTVAKKATTIQLGNYIGRNSTEVISELKQKKVPENLIKIEEEESSESEPGTIMKQSPGAGTTYDVSKPTQIVLTVAKKVTSVAMPSYIGSSLEFTKNNLIQIVGIKEANIEVVEVTTAPAGSVEGMVVEQSPRAGEKVDLNKTRVKISIYKPKTTSATP

SEQ ID NO: 315 - protein, 659 aa, Streptococcus pneumoniae Pj-1322; identical to SEQ ID NO: 309

SEQ ID NO: 316 - protein, 659 aa, Streptococcus pneumoniae Pj-1369; identical to SEQ ID NO: 226

SEQ ID NO: 317 - protein, 659 aa, Streptococcus pneumoniae Pj-2185; identical to SEQ ID NO: 263

SEQ ID NO: 318 - protein, 309 aa, Streptococcus pneumoniae CDC 5
MKKLGTLLVLFLSAIILVACASGKKDTTSGQKLKVVATNSIIADITKNIAGDKIDLHSIVPIGQDPHEYEPLPEDVKKTSEADLIFYNGINLETGGNAWFTKLVENAKKTENKDYFAVSDGVDVIYLEGQNEKGKEDPHAWLNLENGIIFAKNIAKQLSAKDPNNKEFYEKNLKEYTDKLDKLDKESKDKFNKIPAEKKLIVTSEGAFKYFSKAYGVPSAYIWEINTEAEGTPEQIKTLVEKLRQTKVPSLFVESSVDDRPMKTVSQDTNIPIYAQIFTDSIAEQGKEGDSYYSMMKYNLDKIAEGLAK

SEQ ID NO: 319 - protein, 309 aa, Streptococcus pneumoniae CDC 8
MKKLGTLLVLFLSAIILVACASGKKDTTSGQKLKVVATNSIIADITKNIAGDKIDLHSIVPIGQDPHEYEPLPEDVKKTSEADLIFYNGINLETGGNAWFTKLVENAKKTENKDYFAVSDGVDVIYLEGQNEKGKEDPHAWLNLENGIIFAKNIAKQLSAKDPNNKEFYEKNLKEYTDKLDKLDKESKDKFNKIPAEKKLIVTSEGAFKYFSKAYGVPSAYIWEINTEKEGTPEQIKTLVEKLRQTKVPSLFVESSVDDRPMKTVSQDTNIPIYAQIFTDSIAEQGKEGDSYYSMMKYNLDKIAEGLAK

SEQ ID NO: 320 - protein, 309 aa, Streptococcus pneumoniae CDC 12
MKKLGTLLVLFLSAIILVACASGKKDTTSGQKLKVVATNSIIADITKNIAGDKIDLHSIVPIGQDPHEYEPLPEDVKKTSEANLIFYNGINLETGGNAWFTKLVENAKKTENKDYFAVSDGVDVIYLEGQNEKGKEDPHAWLNLENGIIFAKNIAKQLSAKDPNNKEFYEKNLKEYTDKLDKLDKESKDKFNKIPAEKKLIVTSEGAFKYFSKAYGVPSAYIWEINTEKEGTPEQIKTLVEKLRQTKVPSLFVESSVDDRPMKTVSQDTNIPIYAQIFTDSIAEQGKEGDSYYSMMKYNLDKIAEGLAK

SEQ ID NO: 321 - protein, 309 aa, Streptococcus pneumoniae CDC 33
MKKLGTLLVLFLSAIILVACASGKKATTSGQKLKVVATNSIIADITKNIAGDKIDLHSIVPIGQDPHEYEPLPEDVKKTSEADLIFYNGINLETGGNAWFTKLVENAKKTENKDYFAVSDGVDVIYLEGQNEKGKEDPHAWLNLENGIIFAKNIAKQLSAKDPNNKEFYEKNLKEYTDKLDKLDKESKDKFNKIPAEKKLIVTSEGAFKYFSKAYGVPSAYIWEINTEEEGTPEQIKTLVEKLRQTKVPSLFVESSVDDRPMKTVSQDTNIPIYAQIFTDSIAEQGKEGDSYYSMMKYNLDKIAEGLAK

SEQ ID NO: 322 - protein, 309 aa, Streptococcus pneumoniae CDC 36
MKKLGTLLVLFLSVIALVACASGKKDAASGQKLKVVATNSIIADITKNIAGDKIDLHSIVPVGQDPHEYEPLPEDVKKTSEADLIFYNGINLETGGNAWFTKLVENAKKTENKDYFAVSEGVDVIYLEGKNEKGKEDPHAWLNLENGIIFAKNIAKQLSAKDPSNKEFYEKNLKEYTDKLDKLDKEAKAKFNNIPAEKKLIVTSEGCFKYFSKAYGVPSAYIWEINTEEEGTPEQIKTLVEKLRQTKVPSLFVESSVDDRPMKTVSQDTNIPIYAQIFTDSIAEQGKEGDSYYNMMKYNLDKIAEGLAK

SEQ ID NO: 323 - protein, 309 aa, Streptococcus pneumoniae CDC 38; identical to SEQ ID NO: 321

SEQ ID NO: 324 - protein, 309 aa, Streptococcus pneumoniae CDC 56; identical to SEQ ID NO: 319

SEQ ID NO: 325 - protein, 309 aa, Streptococcus pneumoniae CDC 58; identical to SEQ ID NO: 322

SEQ ID NO: 326 - protein, 309 aa, Streptococcus pneumoniae CDC 66
MKKLGTLLVLFLSAIILVACASGKKDTTSGQKLKVVATNSIIADITKNIAGDKIDLHSIVPIGQDPHEYEPLPEDVKKTSEANLIFYNGINLETGGNAWFTKLVENAKKTENKDYFAVSDGVDVIYLEGQNEKGKEDPHAWLNLENGIIFAKNIAKQLSAKDPNNKEFYEKNLKEYTDKLDKLDKESKDKFNKIPAEKKLIVTSEGAFKYFSKAYGVPSAYIWEINTEEEGTPEQIKTLVEKLRQTKVPSLFVESSVDDRPMKTVSQDTNIPIYAQIFTDSIAEQGKEGDSYYSMMKYNLDKIAEGLAK

SEQ ID NO: 327 - protein, 309 aa, Streptococcus pneumoniae CDC 69
MKKLGTLLVLFLSAIILVACASGKKDTTSGQKLKVVATNSIIADITKNIAGDKIDLHSIVPIGQDPHEYEPLPEDVKKTSEADLIFYNGINLETGGNAWFTKLVENAKKTENKDYFAVSDGVDVIYLEGQNEKGKEDPHAWLNLENGIIFAKNIAKQLSAKDPNNKEFYEKNLKEYTDKLDKLDKESKDKFNKIPAEKKLIVTSEGAFKYFSKAYGVPSAYIWEINTEEEGTPEQIKTLVEKLRQTKVPSLFVESSVDDRPMKTVSQDTNIPIYAQIFTDSIAEQGKEGDSYYSMMKYNLDKIAEGLAK

SEQ ID NO: 328 - protein, 309 aa, Streptococcus pneumoniae CDC 74
MKKLGTLLVLFLSAIILVACASGKKDTTSGQKLKVVATNSIIADITKNIAGDKIDLHSIVPIGQDPHEYEPLPEDVKKTSEADLIFYNGINLETGGNAWFTKLVENAKKTENKDYFAVSDGVDVIYLEGQNEKGKEDPHAWLNLENGIIFAKNIAKQLSAKDPNNKEFYEKNLKEYTDKLDKLDKESKDKFNKIPAEKKLIVTSEGAFKYFSKAYGVPSAYIWEINTEEEGTPEQIKTLVEKLRQTKVPSLFAESSVDDRPMKTVSQDTNIPIYAQIFTDSIAEQGKEGDSYYSMMKYNLDKIAEGLAK

SEQ ID NO: 329 - protein, 309 aa, Streptococcus pneumoniae CDC 96
MKKLGTLLVLFLSAIILVACASGKKDTTSGQKLKVVATNSIIADITKNIAGDKIDLHSIVPIGQDPHEYEPLPEDVKKTSEADLIFYNGINLETGGNAWFTKLVENAKKTENKDYFAVSDGVDVIYLEGQNEKGKEDPHAWLNLENGIIFAKNIAKQLSAKDPNNKEFYEKNLKEYTDKLDKLDKESKNKFNKIPAEKKLIVTSEGAFKYFSKAYGVPSAYIWEINTEEEGTPEQIKTLVEKLRQTKVPSLFVESSVDDRPMKTVSQDTNIPIYAQIFTDSIAEQGKEGDSYYSMMKYNLDKIAEGLAK

SEQ ID NO: 330 - protein, 309 aa, Streptococcus pneumoniae CDC 114
MKKLGTLLVLFLSAIILVACASGKKDTTSGQKLKVVATNSIIADITKNIAGDKIDLHSIVPIGQDPHEYEPLPEDVKKTSEADLIFYNGINLETGGNAWFTKLVENAKKTENKDYFAVSDGVDVIYLEGQNEKGKEDPHAWLNLENGIIFAKNIAKQLSAKDPNNKEFYEKNLKEYTDKLDKLDKESKDKFNKISAEKKLIVTSEGAFKYFSKAYGVPSAYIWEINTEEEGTPEQIKTLVEKLRQTKVPSLFVESSVDDRPMKTVSQDTNIPIYAQIFTDSIAEQGKEGDSYYSMMKYNLDKIAEGLAK

SEQ ID NO: 331 - protein, 309 aa, Streptococcus pneumoniae CDC 116; identical to SEQ ID NO: 326

1. An isolated protective peptide consisting of the amino acid sequence of the SEQ ID NO:1, 2, 3, 4, or 5, or a functionally active variant of the protective peptide.

2. The functionally active variant of the protective peptide of claim 1, wherein the functionally active variant
a) is a functionally active fragment of the protective peptide, the functionally active fragment comprising at least 75% of the sequence of the protective peptide;
b) is derived from the protective peptide by at least one amino acid substitution and/or deletion, wherein the functionally active variant has a sequence identity to the protective peptide or to the functionally active fragment as defined in a) of at least 75; and/or
c) consists of the protective peptide or a functionally active variant thereof and additionally at least one amino acid heterologous to the protective peptide; or
d) results from a combination of a), b), and c).

3. A composition comprising at least two proteins selected from the group consisting of a protective protein comprising or consisting of the protective peptide or a functionally active variant thereof of claim 1.

4. A composition comprising at least two proteins selected from the group consisting of
i) a protective protein comprising or consisting of the protective peptide or functionally active variant thereof of claim 1
ii) an additional protective protein comprising or consisting of the additional protective peptide consisting of the amino acid sequence of the SEQ ID NO:6 or 7, or a functionally active variant of the additional protective peptide, and
iii) a supportive protein comprising or consisting of the supportive peptide of the SEQ ID NO:8 or a functionally active variant of the supportive peptide,
wherein the at least two proteins are selected from at least two of the subgroups i), ii), and iii).

5. A composition comprising at least three proteins selected from the group consisting of
i) a protective protein comprising or consisting of the protective peptide or functionally active variant thereof of claim 1;
ii) an additional protective protein comprising or consisting of the additional protective peptide consisting of the amino acid sequence of the SEQ ID NO:6 or 7, or a functionally active variant of the additional protective peptide, and
iii) a supportive protein comprising or consisting of the supportive peptide of the SEQ ID NO:8 or a functionally active variant of the supportive peptide,
wherein the at least three proteins are selected from at least two of the subgroups i), ii), and iii).

6. A composition according to claim 5, wherein at least one protein is selected from the subgroup i), and at least two proteins are selected from the group consisting of subgroups ii) and subgroup iii).

7. A composition according to claim 5, wherein the at least three proteins are selected from the three subgroups i), ii), and iii).

8. The composition of claim 3, wherein two or more proteins of the at least two proteins are combined into one fusion protein.

9. The composition of claim 4 comprising a protein selected from the group consisting of
at least one protein as defined in i) and at least one protein as defined in ii);
at least one protein as defined in i) and at least one protein as defined in iii);
at least one protein as defined in i) and at least two proteins as defined in ii);
at least one protein as defined in i) and at least two proteins as defined in iii); and
at least one protein as defined in i) and at least one protein as defined in ii) and at least one protein as defined in iii).

10. The composition of claim 4 comprising a protein selected from the group consisting of
at least one protein comprising or consisting of the amino acid sequence of SEQ ID NO:1, 2, 3, 4, or 5 and at least one protein comprising or consisting of the amino acid sequence of SEQ ID NO:6;
at least one protein comprising or consisting of the amino acid sequence of SEQ ID NO:1, 2, 3, 4, or 5 and at least one protein comprising or consisting of the amino acid sequence of SEQ ID NO:7;
at least one protein comprising or consisting of the amino acid sequence of SEQ ID NO:1, 2, 3, 4, or 5 and at least one protein comprising or consisting of the amino acid sequence of SEQ ID NO:8;
at least one protein comprising or consisting of the amino acid sequence of SEQ ID NO:1, 2, 3, 4, or 5 and at least one protein comprising or consisting of the amino acid sequence of SEQ ID NO:6 and at least one protein comprising or consisting of the amino acid sequence of SEQ ID NO:7;
at least one protein comprising or consisting of the amino acid sequence of SEQ ID NO: 1, 2, 3, 4, or 5 and at least one protein comprising or consisting of the amino acid sequence of SEQ ID NO:6 and at least one protein comprising or consisting of the amino acid sequence of SEQ ID NO:8; and
at least one protein comprising or consisting of the amino acid sequence of SEQ ID NO: 1, 2, 3, 4, or 5 and at least one protein comprising or consisting of the amino acid sequence of SEQ ID NO:7 and at least one protein comprising or consisting of the amino acid sequence of SEQ ID NO:8.

11. The composition of claim 4, wherein the functionally active variant of the additional protective peptide
a) is a functionally active fragment of the additional protective peptide, the functionally active fragment comprising at least 60% of the sequence of the additional protective peptide;
b) is derived from the additional protective peptide by at least one amino acid substitution, addition and/or deletion and has a sequence identity to the additional protective peptide or to the functionally active fragment as defined in a) of at least 60
c) consists of the additional protective peptide or a functionally active variant thereof and at least one amino acid heterologous to the additional protective peptide or
d) results from a combination of a), b), and c).

12. The composition of claim 4, wherein the functionally active variant of the supportive peptide
a) is a functionally active fragment of the supportive peptide, the functionally active fragment comprising at least 60% of the sequence of the supportive peptide;
b) is derived from the supportive peptide by at least one mutation selected from the group consisting of amino acid substitution, addition and/or deletion and has a sequence identity to the supportive peptide or to the functionally active fragment as defined in a) of at least 60%
c) consists of the supportive peptide or a functionally active variant thereof and at least one amino acid heterologous to the supportive peptide; or
d) results from a combination of a), b), and c).

13. One or more isolated nucleic acid(s) encoding the protective peptides or functionally active variants thereof according to claim 1.

14. The one or more isolated nucleic acid(s) of claim 13, wherein the nucleic acid(s) is/are located in a vector or a cell other than S. pneumoniae.

15. A pharmaceutical composition, comprising at least one protective peptide or functionally active variant thereof according to claim 1, and a pharmaceutically acceptable carrier or excipient.

16. A pharmaceutical composition comprising
(i) the one or more nucleic acid(s) according to claim 13 or one or more nucleic acid(s) complementary thereto, and
(ii) a pharmaceutically acceptable carrier or excipient.

17. (canceled)

18. A method for producing an antibody, characterized by the following steps:
(a) contacting a B cell with an effective amount of at least one protective peptide or functionally active variant thereof according to claim 1;
(b) fusing the B cell of step (a) with a myeloma cell to obtain a hybridoma cell; and
(c) isolating the antibody produced by the cultivated hybridoma cell.

19. (canceled)

20. A method of treating a subject having an S. pneumonia infection comprising administering to the subject a pharmaceutically effective amount of the protective peptide according to claim 1.

21-24. (canceled)

25. A method of immunizing a subject against an S. pneumonia infection comprising administering to the subject a pharmaceutically effective amount of the protective peptide according to claim 1.
